(19) United States
(12) Patent Application Publication
(10) Pub. No.: US 2026/0022143 A1
(43) Pub. Date: Jan. 22, 2026

(54) Cyclic Peptide Inhibitors of IL-23

(71) Applicant: JANSSEN PHARMACEUTICA NV, Beerse (BE)

(72) Inventors: Stephanie Barros, Chalfont, PA (US); Boying Guo, Warrington, PA (US); Charles Hendrick, North Wales, PA (US); David Marcoux, Newton Centre, MA (US); Santhosh Neelamkavil, Edison, NJ (US); Sandeep Somani, Princeton, NJ (US); Chengzao Sun, Warrington, PA (US); Tho Van Thieu, North Wales, PA (US); Jing Zhang, Wilmington, DE (US); Raymond J. Patch, Yardley, PA (US); Elisabetta Bianchi, Roma (IT); Danila Branca, Pomezia (IT); Gianni Cavallo, Lesina (FG) (IT); Roberto Costante, Pomezia (IT); Raffaele Ingenito, Pomezia (IT); Antonia Rinaldi, Valsinni (MT) (IT)

(21) Appl. No.: 18/993,874

(22) PCT Filed: Jul. 14, 2023
(86) PCT No.: PCT/US2023/070202

§ 371 Date: Jan. 13, 2025

Related U.S. Application Data
(60) Provisional application No. 63/389,242, filed on Jul. 14, 2022.

(51) Int. Cl. C07K 7/64; A61K 38/00

(52) U.S. Cl. CPC C07K 7/64; A61K 38/00

(57) ABSTRACT

The present invention relates to novel cyclic peptide inhibitors of the interleukin-23 receptor (IL-23R) or pharmaceutically acceptable salt thereof, corresponding pharmaceutical compositions, methods and/or uses for treatment of autoimmune inflammation and related diseases and disorders.

### CROSS REFERENCE TO RELATED APPLICATIONS

[0001] This application is a 35 U.S.C. § 371 filing of International Patent Application No. PCT/US2023/070202, filed Jul. 14, 2023, which claims priority to U.S. Patent Application No. 63/389,242, filed Jul. 14, 2022, the contents of each of which are incorporated herein by reference in their entirety.

### FIELD OF THE INVENTION

[0002] The present invention relates to novel peptide inhibitors of the interleukin-23 receptor (IL-23R) or pharmaceutically acceptable salts, solvates and/or other forms thereof, invention relates to corresponding pharmaceutical compositions, methods and/or uses of the IL-23R inhibitors for treatment of autoimmune inflammation diseases and/or related disorders.

### REFERENCE TO SEQUENCE LISTING SUBMITTED ELECTRONICALLY

[0003] This application contains a sequence listing, which is submitted electronically via The United States Patent and Trademark Center Patent Center as an XML formatted sequence listing with a file name “760766_NTT-6738US_SL.xml” and a creation date of Mar. 19, 2025, and having a size of 3,262,341 bytes. The sequence listing submitted via Patent Center is part of the specification and is herein incorporated by reference.

### BACKGROUND

[0004] The interleukin-23 (IL-23) cytokine has been implicated as playing a crucial role in the pathogenesis of autoimmune inflammation and related diseases and disorders, such as multiple sclerosis, asthma, rheumatoid arthritis, psoriasis, and inflammatory bowel diseases (IBDs), for example, ulcerative colitis and Crohn's disease. Studies in acute and chronic mouse models of IBD revealed a primary role of interleukin-23 receptor (IL-23R) and downstream effector cytokines in disease pathogenesis. IL-23R is expressed on various adaptive and innate immune cells including Th17 cells, γδ T cells, natural killer (NK) cells, dendritic cells, macrophages, and innate lymphoid cells, which are found abundantly in the intestine. At the intestine mucosal surface, the gene expression and protein levels of IL-23R are found to be elevated in IBD patients. It is believed that IL-23 mediates this effect by promoting the development of a pathogenic CD4⁺ T cell population that produces IL-6, IL-17, and tumor necrosis factor (TNF).

[0005] Production of IL-23 is enriched in the intestine, where it is believed to play a key role in regulating the balance between tolerance and immunity through T-cell-dependent and T-cell-independent pathways of intestinal inflammation through effects on T-helper 1 (Th1) and Th17-associated cytokines, as well as restraining regulatory T-cell responses in the gut, favoring inflammation. In addition, polymorphisms in the IL-23 receptor (IL-23R) have been associated with susceptibility to inflammatory bowel diseases (IBDs), further establishing the critical role of the IL-23 pathway in intestinal homeostasis.

[0006] Psoriasis, a chronic skin disease affecting about 2%-3% of the general population has been shown to be mediated by the body's T cell inflammatory response mechanisms. IL-23 has one of several interleukins implicated as a key player in the pathogenesis of psoriasis, purportedly by maintaining chronic autoimmune inflammation via the induction of interleukin-17, regulation of T memory cells, and activation of macrophages. Expression of IL-23 and IL-23R has been shown to be increased in tissues of patients with psoriasis, and antibodies that neutralize IL-23 showed IL-23-dependent inhibition of psoriasis development in animal models of psoriasis.

[0007] IL-23 is a heterodimer composed of a unique p19 subunit and the p40 subunit shared with IL-12, which is a cytokine involved in the development of interferon-γ (IFN-γ)-producing T helper 1 (T_{H}1) cells. Although IL-23 and IL-12 both contain the p40 subunit, they have different phenotypic properties. For example, animals deficient in IL-12 are susceptible to inflammatory autoimmune diseases, whereas IL-23 deficient animals are resistant, presumably due to a reduced number of CD4⁺ T cells producing IL-6, IL-17, and TNF in the CNS of IL-23-deficient animals. IL-23 binds to IL-23R, which is a heterodimeric receptor composed of IL-12Rβ1 and IL-23R subunits. Binding of IL-23 to IL-23R activates the Jak-Stat signaling molecules, Jak2, Tyk2, and Stat1, Stat 3, Stat 4, and Stat 5, although Stat4 activation is substantially weaker and different DNA-binding Stat complexes form in response to IL-23 as compared with IL-12. IL-23R associates constitutively with Jak2 and in a ligand-dependent manner with Stat3. In contrast to IL-12, which acts mainly on naive CD4(+) T cells, IL-23 preferentially acts on memory CD4(+) T cells.

[0008] Therapeutic moieties that inhibit the IL-23 pathway have been developed for use in treating IL-23-related diseases and disorders. A number of antibodies that bind to IL-23 or IL-23R have been identified, including ustekinumab, which has been approved for the treatment of moderate to severe plaque psoriasis (PSO), active psoriatic arthritis (PSA), moderately to severely active Crohn's disease (CD) and moderately to severely active ulcerative colitis (UC). Examples of such identified antibodies, include: Tildrakizumab, an anti-IL23 antibody approved for treatment of plaque psoriasis, Guselkumab, an anti-IL23 antibody approved for treatment of psoriatic arthritis and Risankizumab, an anti-IL23 antibody approved for the treatment of plaque psoriasis in the US, and generalized pustular psoriasis, erythrodermic psoriasis and psoriatic arthritis in Japan.

[0009] Although targeted TL-23 antibody therapeutics are used clinically, there are no small-molecule therapeutics that selectively inhibit TL-23 signaling. There are some identified polypeptide inhibitors that bind to TL-23R and inhibit binding of IL-23 to TL-23R (see, e.g., US Patent Application Publication No. US2013/0029907).Thus, there remains a significant need in the art for effective small-molecule and/or polypeptide therapeutic agents to treat and/or prevent IL-23-associated and/or IL23R-associated diseases and disorders.

### BRIEF SUMMARY

[0010] In general, the present invention relates to novel peptide inhibitors of the interleukin-23 receptor (TL-23R) or pharmaceutically acceptable salts, solvates and/or other forms thereof., corresponding pharmaceutical compositions, methods and/or uses of the TL-23R inhibitors for treatment of autoimmune inflammation diseases and/or related disorders.

[0011] In particular, the present invention relates to a cyclic peptide, or a pharmaceutically acceptable salt or solvate thereof, comprising an amino acid sequence of Formula (A):

(A)
Z³-Z⁴-Z⁵-Z⁶-Z⁷-Z⁸-Z⁹⁻¹⁰-Z¹¹-Z¹²-Z¹³-Z¹⁴-Z¹⁵-Z¹⁶,

wherein:
[0012] the amino acid residue at position Z³ is absent or the residue of r;
[0013] the amino acid residue at position Z⁴ is the residue of an amino acid that is connected to the amino acid residue at position Z⁹;
[0014] the amino acid residue at position Z⁵ is the residue of N(N(Me)₂);
[0015] the amino acid residue at position Z⁶ is the residue of T;
[0016] the amino acid residue at position Z⁷ is the residue of 7MeW;
[0017] the amino acid residue at position Z⁸ is the residue of K(NMeAc);
[0018] the amino acid residue at position Z⁹ is the residue of an amino acid that is connected to the amino acid residue at position Z⁴;
[0019] the amino acid residue at position Z¹⁰ is the residue of TMAPF;
[0020] the amino acid residue at position Z¹¹ is the residue of 2Nal;
[0021] the amino acid residue at position Z¹² is absent or the residue of THP;
[0022] the amino acid residue at position Z¹³ is the residue of K(NMeAc);
[0023] the amino acid residue at position Z¹⁴ is the residue of N;
[0024] the amino acid residue at position Z¹⁵ is absent or the residue of 3Pya;
[0025] the amino acid residue at position Z¹⁶ is absent or the residue of Sar;
[0026] eight or fewer of the amino acid residues at positions Z³, Z⁵, Z⁶, Z⁷, Z⁸, Z¹⁰, Z¹¹, Z¹², Z¹³, Z¹⁴, Z¹⁵ and Z¹⁶, when an amino acid residue is present at the position, are independently replaced with an amino acid residue that is different from the amino acid residue recited at said position; and
[0027] at least one of the amino acid residues at positions Z³, Z⁵, Z⁶, Z⁷, Z⁸, Z¹⁰, Z¹¹, Z¹², Z¹³, Z¹⁴, Z¹⁵ and/or Z¹⁶, when an amino acid residue is present at the position, each independently comprise(s) at least one quaternary amine.

[0028] In particular, the present invention relates to a cyclic peptide, or a pharmaceutically acceptable salt or solvate thereof, comprising an amino acid sequence of Formula (B):

(B)
Z³-Z⁴-Z⁵-Z⁶-Z⁷-Z⁸-Z⁹-Z¹⁰-Z¹¹-Z¹²_Z¹³-Z¹⁴-Z¹⁵-Z¹⁶,

wherein:
[0029] the amino acid residue at position Z³ is absent or the residue of r;
[0030] the amino acid residue at position Z⁴ is the residue of an amino acid that is connected to the amino acid residue at position Z⁹;
[0031] the amino acid residue at position Z⁵ is the residue of N(N(Me)₂);
[0032] the amino acid residue at position Z⁶ is the residue of T;
[0033] the amino acid residue at position Z⁷ is the residue of 7MeW;
[0034] the amino acid residue at position Z⁸ is the residue of K(NMeAc);
[0035] the amino acid residue at position Z⁹ is the residue of an amino acid that is connected to the amino acid residue at position Z⁴;
[0036] the amino acid residue at position Z¹⁰ is the residue of TMAPF;
[0037] the amino acid residue at position Z¹¹ is the residue of 2Nal;
[0038] the amino acid residue at position Z¹² is absent or the residue of THP;
[0039] the amino acid residue at position Z¹³ is the residue of K(NMeAc);
[0040] the amino acid residue at position Z¹⁴ is the residue of N;
[0041] the amino acid residue at position Z¹⁵ is absent or the residue of 3Pya;
[0042] the amino acid residue at position Z¹⁶ is absent or the residue of Sar; eight or fewer of the amino acid residues at positions Z³, Z⁵, Z⁶, Z⁷, Z⁸, Z¹⁰, Z¹¹, Z¹², Z¹³, Z¹⁴, Z¹⁵ and Z¹⁶, when an amino acid residue is present at the position, are independently replaced with an amino acid residue that is different from the amino acid residue recited at said position; and
[0043] at least one of the amino acid residues at positions Z³, Z⁵, Z⁶, Z⁷, Z⁸, Z¹⁰, Z¹¹, Z¹², Z¹³, Z¹⁴, Z¹⁵ and/or Z¹⁶, when an amino acid residue is present at the position, each independently comprise(s) at least one masked amine and/or masked amide.

[0044] In particular, the present invention relates to a cyclic peptide, or a pharmaceutically acceptable salt or solvate thereof, comprising an amino acid sequence of Formula (C):

(C)
Z³-Z⁴-Z⁵-Z⁶-Z⁷-Z⁸-Z⁹-Z¹⁰-Z¹¹-Z¹²-Z¹³-Z¹⁴-Z¹⁵-Z¹⁶,

wherein:
[0045] the amino acid residue at position Z³ is absent or the residue of r;
[0046] the amino acid residue at position Z⁴ is the residue of an amino acid that is connected to the amino acid residue at position Z⁹;
[0047] the amino acid residue at position Z⁵ is the residue of N(N(Me)₂);
[0048] the amino acid residue at position Z⁶ is the residue of T;
[0049] the amino acid residue at position Z⁷ is the residue of 7MeW;
[0050] the amino acid residue at position Z⁸ is the residue of K(NMeAc);
[0051] the amino acid residue at position Z⁹ is the residue of an amino acid that is connected to the amino acid residue at position Z⁴;
[0052] the amino acid residue at position Z¹⁰ is the residue of TMAPF;
[0053] the amino acid residue at position Z¹¹ is the residue of 2Nal;
[0054] the amino acid residue at position Z¹² is absent or the residue of THP;
[0055] the amino acid residue at position Z¹³ is the residue of K(NMeAc);
[0056] the amino acid residue at position Z¹⁴ is the residue of N;
[0057] the amino acid residue at position Z¹⁵ is absent or the residue of 3Pya;
[0058] the amino acid residue at position Z¹⁶ is absent or the residue of Sar; and
[0059] eight or fewer of the amino acid residues at positions Z³, Z⁵, Z⁶, Z⁷, Z⁸, Z¹⁰, Z¹¹, Z¹², Z¹³, Z¹⁴, Z¹⁵ and Z¹⁶, when an amino acid residue is present at the position, are independently replaced with an amino acid residue that is different from the amino acid residue recited at said position.

[0060] The present invention also relates to a compound which is selected from any one of the tables 1A, 1B, 1C, 1D, 1E and 1 F or pharmaceutically acceptable salts thereof or solvates thereof.

[0061] In particular, the present invention relates to a compound of Formulae (I) to (X), or pharmaceutically acceptable salts, solvates and/or other forms thereof. corresponding pharmaceutical compositions, methods and/or uses for treatment of autoimmune inflammation diseases and related disorders.

[0062] The present invention relates to novel peptide inhibitors of the interleukin-23 receptor (IL-23R) of Formulae (I) to (VI) or pharmaceutically acceptable salts, solvates and/or other forms thereof, invention relates to corresponding pharmaceutical compositions, methods and/or uses of the IL-23R inhibitors for treatment of autoimmune inflammation diseases and/or related disorders.

[0063] The present invention also relates to compounds set forth in any of Tables 1A-H, or pharmaceutically acceptable salts, solvates, or forms thereof, corresponding pharmaceutical compositions, and methods and/or uses for treatment of autoimmune inflammation diseases and related disorders.

[0064] The present disclosure also relates to pharmaceutical composition(s), which comprises a herein-described peptide inhibitor compound of the or a pharmaceutically acceptable salt, solvate, or form thereof as described herein, and a pharmaceutically acceptable carrier, excipient, or diluent. The pharmaceutical compositions may comprise or may exclude an absorption enhancer depending on the intended route of delivery or use thereof for treatment of specific indications. The absorption enhancer may be permeation enhancer or intestinal permeation enhancer. In an aspect the absorption enhancer improves oral bioavailability.

[0065] The present invention relates to method(s) for treating and/or uses(s) for inflammatory disease(s) in a subject, which comprises administering a therapeutically effective amount of one or more herein-described peptide inhibitor compounds of the IL-23R or pharmaceutically acceptable salts, or solvates thereof, or a corresponding pharmaceutical composition as described herein, respectively to a subject in need thereof. Such inflammatory diseases and related disorders may include, but are not limited to, inflammatory bowel disease (IBD), Crohn's disease (CD), ulcerative colitis (UC), psoriasis (PsO), or psoriatic arthritis (PsA) and the like.

[0066] The present inventionprovides for the use of one or more herein-described compounds (e.g., compounds of Formulae (I) to (X) or Tables 1A to 1H) for the preparation of pharmaceutical compositions for use in the treatment of inflammatory diseases and related disorders including, but not limited to, inflammatory bowel disease (IBD), Crohn's disease (CD), ulcerative colitis (UC), psoriasis (PsO), and psoriatic arthritis (PsA).

[0067] The present inventionprovides for the use of one or more herein-described compounds of Formulae (I) to (X) or Tables 1A to 1H in the treatment of inflammatory diseases and related disorders including, but not limited to, inflammatory bowel disease (IBD), Crohn's disease (CD), ulcerative colitis (UC), psoriasis (PsO), and psoriatic arthritis (PsA).

[0068] The present inventionprovides for kits comprising one or more herein-described compounds of Formulae (I) to (X) or Tables 1A to 1H and instructions for use in treating an a disease in a patient. The disease may be an inflammatory diseases or related disorder including, but not limited to, inflammatory bowel disease (IBD), Crohn's disease (CD), ulcerative colitis (UC), psoriasis (PsO), and psoriatic arthritis (PsA).

### DETAILED DESCRIPTION

### I. GENERAL

[0069] The cyclic peptides of the present invention comprise quaternary amines, masked amines, masked amides or combinations thereof. The inclusion of quaternary amines, masked amines, and/or masked amides in the cyclic peptides of the present invention has improved the pharamacokinetic properties of the cyclic peptides compared to other compounds that target IL-23R. For example, the cyclic peptides of the present invention have highly desirable oral PK profiles and improved oral bioavaiability. The cyclic peptides of the present invention also have lower projected human doses. It is contemplated that the quaternary amines and masked amines and/or masked amides achieve these improvements by changing the polarity propreties of the molecules as reflected in the observed Exposed Polar Surface Area (EPSA) values.

[0070] The present invention relates to novel peptide inhibitors of the IL-23R or pharmaceutically acceptable salts, solvates, or forms thereof, corresponding pharmaceutical compositions, methods and/or uses for treatment of autoimmune inflammation and related diseases and disorders.

[0071] The present invention provides or relates to peptide inhibitors of an IL-23R. The peptide inhibitors of the present invention may exhibit enhanced properties, such as longer in vivo half-life, compared to the corresponding cyclic peptide inhibitor of an IL-23R without a cyclic structure. In particular, compounds and methods for specific targeting of IL-23R from the luminal side of the gut may provide therapeutic benefit to IBD patients suffering from local inflammation of the intestinal tissue; and/or orally bioavailable small molecule and/or polypeptide inhibitors of IL-23 may provide both a non-steroidal treatment option for patients with mild to moderate psoriasis and treatment for moderate to severe psoriasis that does not require delivery by infusion.

[0072] Compounds and methods for specific targeting of the IL-23R from the luminal side of the gut may provide therapeutic benefit to IBD patients suffering from local inflammation of the intestinal tissue. In addition, orally bioavailable small molecule and/or polypeptide inhibitors of IL-23 may provide both a non-steroidal treatment option for patients with mild to moderate psoriasis and treatment for moderate to severe psoriasis that does not require delivery by infusion.

[0073] The present invention is directed to addressing these needs by providing peptide inhibitors or pharmaceutically acceptable salts, solvates and/or other forms thereof, that bind IL-23R to inhibit IL-23 binding and signaling, via different suitable routes of administration, which may include but is not limited to oral administration.

[0074] In one general aspect, the invention relates to a cyclic peptide, or a pharmaceutically acceptable salt or solvate thereof, comprising an amino acid sequence of Formula (A):

(A)
Z³-Z⁴-Z⁵-Z⁶-Z⁷-Z⁸-Z⁹-Z¹⁰-Z¹¹-Z¹²-Z¹³-Z¹⁴-Z¹⁵-Z¹⁶,

[0075] wherein:
[0076] the amino acid residue at position Z³ is absent or the residue of r;
[0077] the amino acid residue at position Z⁴ is the residue of an amino acid that is connected to the amino acid residue at position Z⁹;
[0078] the amino acid residue at position Z⁵ is the residue of N(N(Me)₂);
[0079] the amino acid residue at position Z⁶ is the residue of T;
[0080] the amino acid residue at position Z⁷ is the residue of 7MeW;
[0081] the amino acid residue at position Z⁸ is the residue of K(NMeAc);
[0082] the amino acid residue at position Z⁹ is the residue of an amino acid that is connected to the amino acid residue at position Z⁴;
[0083] the amino acid residue at position Z¹⁰ is the residue of TMAPF;
[0084] the amino acid residue at position Z¹¹ is the residue of 2Nal;
[0085] the amino acid residue at position Z¹² is absent or the residue of THP;
[0086] the amino acid residue at position Z¹³ is the residue of K(NMeAc);
[0087] the amino acid residue at position Z¹⁴ is the residue of N;
[0088] the amino acid residue at position Z¹⁵ is absent or the residue of 3Pya;
[0089] the amino acid residue at position Z¹⁶ is absent or the residue of Sar;
[0090] eight or fewer of the amino acid residues at positions Z³, Z⁵, Z⁶, Z⁷, Z⁸, Z¹⁰,, ¹¹, Z¹², Z¹³, Z¹⁴, Z¹⁵ and Z¹⁶, when an amino acid residue is present at the position, are independently replaced with an amino acid residue that is different from the amino acid residue recited at said position; and
[0091] at least one of the amino acid residues at positions Z³, Z⁵, Z⁶, Z⁷, Z⁸, Z¹⁰, Z¹¹, Z¹², Z¹³, Z¹⁴, Z¹⁵ and/or Z¹⁶, when an amino acid residue is present at the position, each independently comprise(s) at least one quaternary amine.

[0092] In another general aspect, the invention relates to a cyclic peptide, or a pharmaceutically acceptable salt or solvate thereof, comprising an amino acid sequence of Formula (B):

(B)
Z³-Z⁴-Z⁵-Z⁶-Z⁷-Z⁸-Z⁹-Z¹⁰-Z¹¹-Z¹²-Z¹³-Z¹⁴-Z¹⁵-Z¹⁶,

[0093] wherein:
[0094] the amino acid residue at position Z³ is absent or the residue of r;
[0095] the amino acid residue at position Z⁴ is the residue of an amino acid that is connected to the amino acid residue at position Z⁹;
[0096] the amino acid residue at position Z⁵ is the residue of N(N(Me)₂);
[0097] the amino acid residue at position Z⁶ is the residue of T;
[0098] the amino acid residue at position Z⁷ is the residue of 7MeW;
[0099] the amino acid residue at position Z⁸ is the residue of K(NMeAc);
[0100] the amino acid residue at position Z⁹ is the residue of an amino acid that is connected to the amino acid residue at position Z⁴;
[0101] the amino acid residue at position Z¹⁰ is the residue of TMAPF;
[0102] the amino acid residue at position Z¹¹ is the residue of 2Nal;
[0103] the amino acid residue at position Z¹² is absent or the residue of THP;
[0104] the amino acid residue at position Z¹³ is the residue of K(NMeAc);
[0105] the amino acid residue at position Z¹⁴ is the residue of N;
[0106] the amino acid residue at position Z¹⁵ is absent or the residue of 3Pya;
[0107] the amino acid residue at position Z¹⁶ is absent or the residue of Sar;
[0108] eight or fewer of the amino acid residues at positions Z³, Z⁵, Z⁶, Z⁷, Z⁸, Z¹⁰, Z¹¹, Z¹², Z¹³, Z⁴, Z⁵ and Z¹⁶, when an amino acid residue is present at the position, are independently replaced with an amino acid residue that is different from the amino acid residue recited at said position; and
[0109] at least one of the amino acid residues at positions Z³, Z⁵, Z⁶, Z⁷, Z⁸, Z¹⁰, Z¹¹, Z¹², Z¹³, Z¹⁴, Z⁵ and/or Z¹⁶, when an amino acid residue is present at the position, each independently comprise(s) at least one masked amine and/or masked amide

[0110] In another general aspect, the invention relates to a cyclic peptide, or a pharmaceutically acceptable salt or solvate thereof, comprising an amino acid sequence of Formula (C):

(C)
Z³-Z⁴-Z⁵-Z⁶-Z⁷-Z⁸-Z⁹-Z¹⁰-Z¹¹-Z¹²-Z¹³-Z¹⁴-Z¹⁵-Z¹⁶,

[0111] wherein:
[0112] the amino acid residue at position Z³ is absent or the residue of r;
[0113] the amino acid residue at position Z⁴ is the residue of an amino acid that is connected to the amino acid residue at position Z⁹;
[0114] the amino acid residue at position Z⁵ is the residue of N(N(Me)₂);
[0115] the amino acid residue at position Z⁶ is the residue of T;
[0116] the amino acid residue at position Z⁷ is the residue of 7MeW;
[0117] the amino acid residue at position Z⁸ is the residue of K(NMeAc);
[0118] the amino acid residue at position Z⁹ is the residue of an amino acid that is connected to the amino acid residue at position Z⁴;
[0119] the amino acid residue at position Z¹⁰ is the residue of TMAPF;
[0120] the amino acid residue at position Z¹¹ is the residue of 2Nal;
[0121] the amino acid residue at position Z¹² is absent or the residue of THP;
[0122] the amino acid residue at position Z¹³ is the residue of K(NMeAc);
[0123] the amino acid residue at position Z¹⁴ is the residue of N;
[0124] the amino acid residue at position Z¹⁵ is absent or the residue of 3Pya;
[0125] the amino acid residue at position Z¹⁶ is absent or the residue of Sar; and
[0126] eight or fewer of the amino acid residues at positions Z³, Z⁵, Z⁶, Z⁷, Z⁸, Z¹⁰, Z¹¹, Z¹², Z¹³, Z⁴, Z⁵ and Z¹⁶, when an amino acid residue is present at the position, are independently replaced with an amino acid residue that is different from the amino acid residue recited at said position.

[0127] In some embodiments, the amino acid residue at position Z⁴ is the residue of Abu or the residue of an amino acid comprising a sulfhydryl group.

[0128] In some embodiments, the amino acid residue at position Z⁹ is the residue of an amino acid comprising a sulfhydryl group.

[0129] In some embodiments, when the amino acid residue at position Z⁴ is the residue of an amino acid comprising a sulfhydryl group, the amino acid residue at position Z⁴ is connected to the amino acid residue at position Z⁹ by a disulfide bond formed between the amino acid comprising a sulfhydryl group at position Z⁴ and the amino acid comprising a sulfhydryl group at position Z⁹.

[0130] In some embodiments, the amino acid residue at position Z⁴ is the residue of an amino acid comprising a sulfhydryl group, and the amino acid residue at position Z⁴ is connected to the amino acid residue at position Z⁹ by a disulfide bond formed between the amino acid comprising a sulfhydryl group at position Z⁴ and the amino acid comprising a sulfhydryl group at position Z⁹.

[0131] In some embodiments, when the amino acid residue at position Z⁴ is the residue of Abu, the amino acid residue at position Z⁴ is connected to the amino acid residue at position Z⁹ by a thioether bond formed between the Abu at position Z⁴ and the amino acid comprising a sulfhydryl group at position Z⁹.

[0132] In some embodiments, the amino acid residue at position Z⁴ is the residue of Abu, and the amino acid residue at position Z⁴ is connected to the amino acid residue at position Z⁹ by a thioether bond formed between the Abu at position Z⁴ and the amino acid comprising a sulfhydryl group at position Z⁹.

[0133] In some embodiments, the cyclic peptide further comprises R^{NT}, wherein R^{NT} is bound to the N-terminal amine of the amino acid residue at position:
[0134] (i) Z³ when Z³ is present, or
[0135] (ii) Z⁴ when Z³ is absent; and
[0136] R^{NT} is selected from the group consisting of: —C(O)-optionally substituted (C₁-C₂₀) alkyl and —C(O)-optionally substituted (C₁-C₄₀) heteroalkyl.

[0137] In some embodiments, the cyclic peptide further comprises R^{CT}, wherein R^{CT} is bound to the carbonyl derived from the C-terminal carboxylic acid of the amino acid residue at position:
[0138] (i) Z¹⁶ when Z¹⁶ is present,
[0139] (ii) Z¹⁵ when Z¹⁶ is absent, or
[0140] (iii) Z¹⁴ when Z¹⁵ and Z¹⁶ are absent; and
[0141] R^{CT} is —N(R^{Y})(R^{Z}), wherein:
[0142] (i) each R^{Y} and R^{Z} is independently selected from the group consisting of: hydrogen, optionally substituted (C₁-C₁₅) alkyl and optionally substituted (C₁-C₃₀) heteroalkyl, or
[0143] (ii) each R^{Y} and R^{Z} come together with the N atom to which they are attached to form an optionally substituted (C₃-C₁₄) heterocyclic ring or an optionally substituted (C₅-C₁₀) bicyclic heterocyclic ring.

[0144] In some embodiments, the cyclic peptide further comprises R^{CT}, wherein R^{CT} is bound to the carbonyl derived from the C-terminal carboxylic acid of the amino acid residue at position:
[0145] (i) Z¹⁶ when Z¹⁶ is present,
[0146] (ii) Z¹⁵ when Z¹⁶ is absent, or
[0147] (iii) Z¹⁴ when Z¹⁵ and Z¹⁶ are absent; and
[0148] R^{CT} is —N(R^{Y})(R^{Z}), wherein:
[0149] (i) each R^{Y} and R^{Z} is independently selected from the group consisting of: hydrogen, optionally substituted (C₁-C₁₅) alkyl and optionally substituted (C₁-C₃₀) heteroalkyl, provided that only one of R and R^{Z} is hydrogen, or
[0150] (ii) each R^{Y} and R^{Z} come together with the N atom to which they are attached to form an optionally substituted (C₃-C₁₄) heterocyclic ring or an optionally substituted (C₅-C₁₀) bicyclic heterocyclic ring.

[0151] In some embodiments, the cyclic peptide further comprises R^{NT} and R^{CT} and is of Formula (D):

(D)
R^{NT}-Z³-Z⁴-Z⁵-Z⁶-Z⁷-Z⁸-Z⁹-Z¹⁰-Z¹¹-Z¹²-Z¹³-Z¹⁴-Z¹⁵-
Z¹⁶-R^{CT},

[0152] wherein R^{NT}, Z³, Z⁴, Z⁵, Z⁶, Z⁷, Z⁸, Z⁹, Z¹⁰, Z¹¹, Z¹², Z¹³, Z¹⁴, Z¹⁵, Z¹⁶ and R^{CT} are as defined herein.

[0153] In some embodiments, eight of the amino acid residues at positions Z³, Z⁵, Z⁶, Z⁷, Z⁸, Z¹⁰, Z¹¹, Z¹², Z¹³, Z¹⁴, Z¹⁵ and Z¹⁶, when an amino acid residue is present at the position, are independently replaced with an amino acid residue that is different from the amino acid residue recited at said position.

[0154] In some embodiments, seven or fewer of the amino acid residues at positions Z³, Z⁵, Z⁶, Z⁷, Z⁸, Z¹⁰, Z¹¹, Z¹², Z¹³, Z¹⁴, Z¹⁵ and Z¹⁶, when an amino acid residue is present at the position, are independently replaced with an amino acid residue that is different from the amino acid residue recited at said position.

[0155] In some embodiments, seven of the amino acid residues at positions Z³, Z⁵, Z⁶, Z⁷, Z⁸, Z¹⁰, Z¹¹, Z¹², Z¹³, Z¹⁴, Z¹⁵ and Z¹⁶, when an amino acid residue is present at the position, are independently replaced with an amino acid residue that is different from the amino acid residue recited at said position.

[0156] In some embodiments, six or fewer of the amino acid residues at positions Z³, Z⁵, Z⁶, Z⁷, Z⁸, Z¹⁰, Z¹¹, Z¹², Z¹³, Z¹⁴, Z¹⁵ and Z¹⁶, when an amino acid residue is present at the position, are independently replaced with an amino acid residue that is different from the amino acid residue recited at said position.

[0157] In some embodiments, six of the amino acid residues at positions Z³, Z⁵, Z⁶, Z⁷, Z⁸, Z¹⁰, Z¹¹, Z¹², Z¹³, Z⁴, Z⁵ and Z¹⁶, when an amino acid residue is present at the position, are independently replaced with an amino acid residue that is different from the amino acid residue recited at said position.

[0158] In some embodiments, five or fewer of the amino acid residues at positions Z³, Z⁵, Z⁶, Z⁷, Z⁸, Z¹⁰, Z¹¹, Z¹², Z¹³, Z¹⁴, Z¹⁵ and Z¹⁶, when an amino acid residue is present at the position, are independently replaced with an amino acid residue that is different from the amino acid residue recited at said position.

[0159] In some embodiments, five of the amino acid residues at positions Z³, Z⁵, Z⁶, Z⁷, Z⁸, Z¹⁰, Z¹¹, Z¹², Z, Z¹⁴, Z¹⁵ and Z¹⁶, when an amino acid residue is present at the position, are independently replaced with an amino acid residue that is different from the amino acid residue recited at said position.

[0160] In some embodiments, four or fewer of the amino acid residues at positions Z³, Z⁵, Z⁶, Z⁷, Z⁸, Z¹⁰, Z¹¹, Z¹², Z¹³, Z¹⁴, Z¹⁵ and Z¹⁶, when an amino acid residue is present at the position, are independently replaced with an amino acid residue that is different from the amino acid residue recited at said position.

[0161] In some embodiments, four of the amino acid residues at positions Z³, Z⁵, Z⁶, Z⁷, Z⁸, Z¹⁰, Z¹¹, Z¹², Z, Z¹⁴, Z¹⁵ and Z¹⁶, when an amino acid residue is present at the position, are independently replaced with an amino acid residue that is different from the amino acid residue recited at said position.

[0162] In some embodiments, three or fewer of the amino acid residues at positions Z³, Z⁵, Z⁶, Z⁷, Z⁸, Z¹⁰, Z¹¹, Z¹², Z¹³, Z¹⁴, Z¹⁵ and Z¹⁶, when an amino acid residue is present at the position, are independently replaced with an amino acid residue that is different from the amino acid residue recited at said position.

[0163] In some embodiments, three of the amino acid residues at positions Z³, Z⁵, Z⁶, Z⁷, Z⁸, Z¹⁰, Z¹¹, Z¹², Z, Z¹⁴, Z¹⁵ and Z¹⁶, when an amino acid residue is present at the position, are independently replaced with an amino acid residue that is different from the amino acid residue recited at said position.

[0164] In some embodiments, two or fewer of the amino acid residues at positions Z³, Z⁵, Z⁶, Z⁷, Z⁸, Z¹⁰, Z¹¹, Z¹², Z¹³, Z¹⁴, Z¹⁵ and Z¹⁶, when an amino acid residue is present at the position, are independently replaced with an amino acid residue that is different from the amino acid residue recited at said position.

[0165] In some embodiments, two of the amino acid residues at positions Z³, Z⁵, Z⁶, Z⁷, Z⁸, Z¹⁰, Z¹¹, Z¹², Z¹³, Z¹⁴, Z¹⁵ and Z¹⁶, when an amino acid residue is present at the position, are independently replaced with an amino acid residue that is different from the amino acid residue recited at said position.

[0166] In some embodiments, one or fewer of the amino acid residues at positions Z³, Z⁵, Z⁶, Z⁷, Z⁸, Z¹⁰, Z¹¹, Z¹², Z¹³, Z¹⁴, Z¹⁵ and Z¹⁶, when an amino acid residue is present at the position, are independently replaced with an amino acid residue that is different from the amino acid residue recited at said position.

[0167] In some embodiments, one of the amino acid residues at positions Z³, Z⁵, Z⁶, Z⁷, Z⁸, Z¹⁰, Z¹¹, Z¹², Z¹³, Z¹⁴, Z¹⁵ and Z¹⁶, when an amino acid residue is present at the position, is independently replaced with an amino acid residue that is different from the amino acid residue recited at said position.

[0168] In some embodiments, none of the amino acid residues at positions Z³, Z⁵, Z⁶, Z⁷, Z⁸, Z¹⁰, Z¹¹, Z¹², Z¹³, Z¹⁴, Z¹⁵ and Z¹⁶, when an amino acid residue is present at the position, are independently replaced with an amino acid residue that is different from the amino acid residue recited at said position.

[0169] In some embodiments, seven or fewer of the amino acid residues at positions Z³, Z⁵, Z⁸, Z¹⁰, Z¹³, Z¹⁵ and Z¹⁶, when an amino acid residue is present at the position, are independently replaced with an amino acid residue that is different from the amino acid residue recited at said position.

[0170] In some embodiments, seven of the amino acid residues at positions Z³, Z⁵, Z⁸, Z¹⁰, Z¹³, Z¹⁵ and Z¹⁶, when an amino acid residue is present at the position, are independently replaced with an amino acid residue that is different from the amino acid residue recited at said position.

[0171] In some embodiments, six or fewer of the amino acid residues at positions Z³, Z⁵, Z⁸, Z¹⁰, Z¹³, Z¹⁵ and Z¹⁶, when an amino acid residue is present at the position, are independently replaced with an amino acid residue that is different from the amino acid residue recited at said position.

[0172] In some embodiments, six of the amino acid residues at positions Z³, Z⁵, Z⁸, Z¹⁰, Z¹³, Z¹⁵ and Z¹⁶, when an amino acid residue is present at the position, are independently replaced with an amino acid residue that is different from the amino acid residue recited at said position.

[0173] In some embodiments, five or fewer of the amino acid residues at positions Z³, Z⁵, Z⁸, Z¹⁰, Z¹³, Z¹⁵ and Z¹⁶, when an amino acid residue is present at the position, are independently replaced with an amino acid residue that is different from the amino acid residue recited at said position.

[0174] In some embodiments, five of the amino acid residues at positions Z³, Z⁵, Z⁸, Z¹⁰, Z¹³, Z¹⁵ and Z¹⁶, when an amino acid residue is present at the position, are independently replaced with an amino acid residue that is different from the amino acid residue recited at said position.

[0175] In some embodiments, four or fewer of the amino acid residues at positions Z³, Z⁵, Z⁸, Z¹⁰, Z¹³, Z¹⁵ and Z¹⁶, when an amino acid residue is present at the position, are independently replaced with an amino acid residue that is different from the amino acid residue recited at said position.

[0176] In some embodiments, four of the amino acid residues at positions Z³, Z⁵, Z⁸, Z¹⁰, Z¹³, Z¹⁵ and Z¹⁶, when an amino acid residue is present at the position, are independently replaced with an amino acid residue that is different from the amino acid residue recited at said position.

[0177] In some embodiments, three or fewer of the amino acid residues at positions Z³, Z⁵, Z⁸, Z¹⁰, Z¹³, Z¹⁵ and Z¹⁶, when an amino acid residue is present at the position, are independently replaced with an amino acid residue that is different from the amino acid residue recited at said position.

[0178] In some embodiments, three of the amino acid residues at positions Z³, Z⁵, Z⁸, Z¹⁰, Z¹³, Z¹⁵ and Z¹⁶, when an amino acid residue is present at the position, are independently replaced with an amino acid residue that is different from the amino acid residue recited at said position.

[0179] In some embodiments, two or fewer of the amino acid residues at positions Z³, Z⁵, Z⁸, Z¹⁰, Z¹³, Z¹⁵ and Z¹⁶, when an amino acid residue is present at the position, are independently replaced with an amino acid residue that is different from the amino acid residue recited at said position.

[0180] In some embodiments, two of the amino acid residues at positions Z³, Z⁵, Z⁸, Z¹⁰, Z¹³, Z¹⁵ and Z¹⁶, when an amino acid residue is present at the position, are independently replaced with an amino acid residue that is different from the amino acid residue recited at said position.

[0181] In some embodiments, one or fewer of the amino acid residues at positions Z³, Z⁵, Z⁸, Z¹⁰, Z³, Z⁵ and Z¹⁶, when an amino acid residue is present at the position, are independently replaced with an amino acid residue that is different from the amino acid residue recited at said position.

[0182] In some embodiments, one of the amino acid residues at positions Z³, Z⁵, Z⁸, Z¹⁰, Z³, Z⁵ and Z¹⁶, when an amino acid residue is present at the position, is independently replaced with an amino acid residue that is different from the amino acid residue recited at said position.

[0183] In some embodiments, four or fewer of the amino acid residues at positions Z⁵, Z⁸, Z¹⁰, and Z¹³ are independently replaced with an amino acid residue that is different from the amino acid residue recited at said position.

[0184] In some embodiments, four of the amino acid residues at positions Z⁵, Z⁸, Z¹⁰, and Z¹³ are independently replaced with an amino acid residue that is different from the amino acid residue recited at said position.

[0185] In some embodiments, three or fewer of the amino acid residues at positions Z⁵, Z⁸, Z¹⁰, and Z¹³ are independently replaced with an amino acid residue that is different from the amino acid residue recited at said position.

[0186] In some embodiments, three of the amino acid residues at positions Z⁵, Z⁸, Z¹⁰, and Z¹³ are independently replaced with an amino acid residue that is different from the amino acid residue recited at said position.

[0187] In some embodiments, two or fewer of the amino acid residues at positions Z⁵, Z⁸, Z¹⁰, and Z¹³ are independently replaced with an amino acid residue that is different from the amino acid residue recited at said position.

[0188] In some embodiments, two of the amino acid residues at positions Z⁵, Z⁸, Z¹⁰, and Z¹³ are independently replaced with an amino acid residue that is different from the amino acid residue recited at said position.

[0189] In some embodiments, one or fewer of the amino acid residues at positions Z⁵, Z⁸, Z¹⁰, and Z¹³ are independently replaced with an amino acid residue that is different from the amino acid residue recited at said position.

[0190] In some embodiments, one of the amino acid residues at positions Z⁵, Z⁸, Z¹⁰, and Z¹³ is independently replaced with an amino acid residue that is different from the amino acid residue recited at said position.

[0191] In some embodiments, the amino acid residue at position Z³, when an amino acid residue is present at the position, is not replaced.

[0192] In some embodiments, the amino acid residue at position Z⁶ is not replaced.

[0193] In some embodiments, the amino acid residue at position Z⁷ is not replaced.

[0194] In some embodiments, the amino acid residue at position Z¹¹ is not replaced.

[0195] In some embodiments, the amino acid residue at position Z¹², when an amino acid residue is present at the position, is not replaced.

[0196] In some embodiments, the amino acid residue at position Z¹⁴ is not replaced.

[0197] In some embodiments, the amino acid residue at position Z¹⁵, when an amino acid residue is present at the position, is not replaced.

[0198] In some embodiments, the amino acid residue at position Z¹⁶, when an amino acid residue is present at the position, is not replaced.

[0199] In some embodiments, the amino acid residues at positions Z⁶ and Z¹¹ are not replaced.

[0200] In some embodiments, the amino acid residues at positions Z⁶ and Z¹⁴ are not replaced.

[0201] In some embodiments, the amino acid residues at positions Z¹¹ and Z¹⁴ are not replaced.

[0202] In some embodiments, the amino acid residues at positions Z⁶, Z¹¹ and Z¹⁴ are not replaced.

[0203] In some embodiments, the amino acid residues at positions Z⁶, Z⁷, Z¹¹ and Z¹⁴ are not replaced.

[0204] In some embodiments, the amino acid residues at positions Z⁶, Z¹¹, Z¹² and Z¹⁴, when an amino acid residue is present at the position, are not replaced.

[0205] In some embodiments, the amino acid residues at positions Z⁶, Z⁷, Z¹¹, Z¹² and Z¹⁴, when an amino acid residue is present at the position, are not replaced.

[0206] In some embodiments, the amino acid residues at positions Z³, Z⁶, Z⁷, Z¹¹, Z¹² and Z¹⁴, when an amino acid residue is present at the position, are not replaced.

[0207] In some embodiments, the amino acid residues at positions Z⁶, Z⁷, Z¹¹, Z¹², Z¹⁴ and Z¹⁵, when an amino acid residue is present at the position, are not replaced.

[0208] In some embodiments, the amino acid residues at positions Z³, Z⁶, Z⁷, Z¹¹, Z¹², Z¹⁴ and Z¹⁵, when an amino acid residue is present at the position, are not replaced.

[0209] In some embodiments, the amino acid residues at positions Z⁶, Z⁷, Z¹¹, Z¹², Z¹⁴ and Z¹⁶, when an amino acid residue is present at the position, are not replaced.

[0210] In some embodiments, the amino acid residues at positions Z³, Z⁶, Z⁷, Z¹¹, Z¹², Z¹⁴ and Z¹⁶, when an amino acid residue is present at the position, are not replaced.

[0211] In some embodiments, the amino acid residues at positions Z⁶, Z⁷, Z¹¹, Z¹², Z¹⁴, Z¹⁵ and Z¹⁶, when an amino acid residue is present at the position, are not replaced.

[0212] In some embodiments, the amino acid residues at positions Z³, Z⁶, Z⁷, Z¹¹, Z¹², Z¹⁴, Z¹⁵ and Z¹⁶, when an amino acid residue is present at the position, are not replaced.

[0213] In some embodiments, three or fewer of the amino acid residues at positions Z³, Z¹², Z¹⁵ and Z¹⁶ are absent.

[0214] In some embodiments, three of the amino acid residues at positions Z³, Z¹², Z¹⁵ and Z¹⁶ are absent.

[0215] In some embodiments, two or fewer of the amino acid residues at positions Z³, Z¹², Z¹⁵ and Z¹⁶ are absent.

[0216] In some embodiments, two of the amino acid residues at positions Z³, Z¹², Z¹⁵ and Z¹⁶ are absent.

[0217] In some embodiments, one or fewer of the amino acid residues at positions Z³, Z¹², Z¹⁵ and Z¹⁶ are absent.

[0218] In some embodiments, one of the amino acid residues at positions Z³, Z¹², Z¹⁵ and Z¹⁶ is absent.

[0219] In some embodiments, none of the amino acid residues at positions Z³, Z¹², Z¹⁵ and Z¹⁶ are absent.

[0220] In some embodiments, the amino acid residue at position Z³ is absent and the amino acid residues at positions Z¹², Z¹⁵ and Z¹⁶ are present.

[0221] In some embodiments, the amino acid residue at position Z¹² is absent and the amino acid residues at positions Z³, Z¹⁵ and Z¹⁶ are present.

[0222] In some embodiments, the amino acid residue at position Z¹⁵ is absent and the amino acid residues at positions Z³, Z¹² and Z¹⁶ are present.

[0223] In some embodiments, the amino acid residue at position Z¹⁶ is absent and the amino acid residues at positions Z³, Z¹² and Z¹⁵ are present.

[0224] In some embodiments, the amino acid residues at positions Z³ and Z¹⁶ are absent and the amino acid residues at positions Z¹² and Z¹⁵ are present.

[0225] In some embodiments, the amino acid residues at positions Z³, Z¹⁵ and Z¹⁶ are absent and the amino acid residue at position Z¹² is present.

[0226] In some embodiments, at least one of R^{NT}, when present, and/or R^{CT}, when present, and/or the amino acid residues at positions Z³, Z⁵, Z⁶, Z⁷, Z⁸, Z°, Z¹¹, Z¹², Z¹³, Z¹⁴, Z¹⁵ and/or Z¹⁶, when an amino acid residue is present at the position, each independently comprise(s) at least one quaternary amine.

[0227] In some embodiments, at least one of R^{NT}, when present, and/or R^{CT}, when present, and/or the amino acid residues at positions Z³, Z⁵, Z⁶, Z⁷, Z⁸, Z°, Z¹¹, Z¹², Z¹³, Z¹⁴, Z¹⁵ and/or Z¹⁶, when an amino acid residue is present at the position, each independently comprise(s) a quaternary amine.

[0228] In some embodiments, at least one of the amino acid residues at positions Z³, Z⁵, Z⁶, Z⁷, Z⁸, Z¹⁰, Z¹¹, Z¹², Z¹³, Z¹⁴, Z¹⁵ and/or Z¹⁶, when an amino acid residue is present at the position, each independently comprise(s) at least one quaternary amine.

[0229] In some embodiments, at least one of the amino acid residues at positions Z³, Z⁵, Z⁶, Z⁷, Z⁸, Z¹⁰, Z¹¹, Z¹², Z¹³, Z¹⁴, Z¹⁵ and/or Z¹⁶, when an amino acid residue is present at the position, each independently comprise(s) a quaternary amine.

[0230] In some embodiments, at least one of R^{NT}, when present, and/or R^{CT}, when present, and/or the amino acid residues at positions Z³, Z⁵, Z⁸, Z¹⁰, Z¹² and/or Z¹³, when an amino acid residue is present at the position, each independently comprise(s) at least one quaternary amine.

[0231] In some embodiments, at least one of R^{NT}, when present, and/or R^{CT}, when present, and/or the amino acid residues at positions Z³, Z⁵, Z⁸, Z¹⁰, Z¹², and/or Z¹³, when an amino acid residue is present at the position, each independently comprise(s) a quaternary amine.

[0232] In some embodiments, at least one of R^{NT}, when present, and/or the amino acid residues at positions Z³, Z⁵, Z⁸, Z¹⁰, and/or Z¹³, when an amino acid residue is present at the position, each independently comprise(s) at least one quaternary amine.

[0233] In some embodiments, at least one of R^{NT}, when present, and/or the amino acid residues at positions Z³, Z⁵, Z⁸, Z¹⁰, and/or Z¹³, when an amino acid residue is present at the position, each independently comprise(s) a quaternary amine.

[0234] In some embodiments, R^{NT} and the amino acid residues at positions Z⁵ and Z¹⁰ each independently comprise at least one quaternary amine.

[0235] In some embodiments, R^{NT} and the amino acid residues at positions Z⁵ and Z¹⁰ each independently comprise a quaternary amine.

[0236] In some embodiments, R^{NT} and the amino acid residues at positions Z⁸ and Z¹⁰ each independently comprise at least one quaternary amine.

[0237] In some embodiments, R^{NT} and the amino acid residues at positions Z⁸ and Z¹⁰ each independently comprise a quaternary amine.

[0238] In some embodiments, R^{NT} and the amino acid residues at positions Z⁸ and Z¹³ each independently comprise at least one quaternary amine.

[0239] In some embodiments, R^{NT} and the amino acid residues at positions Z⁸ and Z¹³ each independently comprise a quaternary amine.

[0240] In some embodiments, the amino acid residues at positions Z⁸, Z¹⁰ and Z¹³ each independently comprise at least one quaternary amine.

[0241] In some embodiments, the amino acid residues at positions Z⁸, Z¹⁰ and Z¹³ each independently comprise a quaternary amine.

[0242] In some embodiments, R^{NT} and the amino acid residue at position Z³ each independently comprise at least one quaternary amine.

[0243] In some embodiments, R^{NT} and the amino acid residue at position Z³ each independently comprise a quaternary amine.

[0244] In some embodiments, R^{NT} and R^{CT} each independently comprise at least one quaternary amine.

[0245] In some embodiments, R^{NT} and R^{CT} each comprise a quaternary amine.

[0246] In some embodiments, R^{NT} and the amino acid residue at position Z⁸ each independently comprise at least one quaternary amine.

[0247] In some embodiments, R^{NT} and the amino acid residue at position Z⁸ each independently comprise a quaternary amine.

[0248] In some embodiments, R^{NT} and the amino acid residue at position Z¹⁰ each independently comprise at least one quaternary amine.

[0249] In some embodiments, R^{NT} and the amino acid residue at position Z¹⁰ each independently comprise a quaternary amine.

[0250] In some embodiments, the amino acid residues at positions Z³ and Z⁸ each independently comprise at least one quaternary amine.

[0251] In some embodiments, the amino acid residues at positions Z³ and Z⁸ each independently comprise a quaternary amine.

[0252] In some embodiments, the amino acid residues at positions Z³ and Z¹⁰ each independently comprise at least one quaternary amine.

[0253] In some embodiments, the amino acid residues at positions Z³ and Z¹⁰ each independently comprise a quaternary amine.

[0254] In some embodiments, the amino acid residues at positions Z⁵ and Z¹⁰ each independently comprise at least one quaternary amine.

[0255] In some embodiments, the amino acid residues at positions Z⁵ and Z¹⁰ each independently comprise a quaternary amine.

[0256] In some embodiments, the amino acid residues at positions Z⁸ and Z¹⁰ each independently comprise at least one quaternary amine.

[0257] In some embodiments, the amino acid residues at positions Z⁸ and Z¹⁰ each independently comprise a quaternary amine.

[0258] In some embodiments, the amino acid residues at positions Z⁸ and Z¹³ each independently comprise at least one quaternary amine.

[0259] In some embodiments, the amino acid residues at positions Z⁸ and Z¹³ each independently comprise a quaternary amine.

[0260] In some embodiments, the amino acid residues at positions Z¹⁰ and Z¹³ each independently comprise at least one quaternary amine.

[0261] In some embodiments, the amino acid residues at positions Z¹⁰ and Z¹³ each independently comprise a quaternary amine.

[0262] In some embodiments, R^{NT} comprises at least one quaternary amine.

[0263] In some embodiments, R^{NT} comprises a quaternary amine.

[0264] In some embodiments, R^{CT} comprises at least one quaternary amine.

[0265] In some embodiments, R^{CT} comprises a quaternary amine.

[0266] In some embodiments, the amino acid residue at position Z³ comprises at least one quaternary amine.

[0267] In some embodiments, the amino acid residue at position Z³ comprises a quaternary amine.

[0268] In some embodiments, the amino acid residue at position Z⁵ comprises at least one quaternary amine.

[0269] In some embodiments, the amino acid residue at position Z⁵ comprises a quaternary amine.

[0270] In some embodiments, the amino acid residue at position Z⁸ comprises at least one quaternary amine.

[0271] In some embodiments, the amino acid residue at position Z⁸ comprises a quaternary amine.

[0272] In some embodiments, the amino acid residue at position Z¹⁰ comprises at least one quaternary amine.

[0273] In some embodiments, the amino acid residue at position Z¹⁰ comprises a quaternary amine.

[0274] In some embodiments, the amino acid residue at position Z¹² comprises at least one quaternary amine.

[0275] In some embodiments, the amino acid residue at position Z¹² comprises a quaternary amine.

[0276] In some embodiments, the amino acid residue at position Z¹³ comprises at least one quaternary amine.

[0277] In some embodiments, the amino acid residue at position Z¹³ comprises a quaternary amine.

[0278] In some embodiments, the at least one quaternary amine is one or two quaternary amines.

[0279] In some embodiments, each quaternary amine is independently selected from the group consisting of:
[0280] (a)

[chemical structure]

wherein each R^{ZA} is independently selected from the group consisting of: optionally substituted (C₁-C₂₀) alkyl and optionally substituted (C₁-C₂₀) heteroalkyl;
[0281] (b)

[chemical structure]

wherein each R^{ZA} and R^{ZB} is independently selected from the group consisting of: optionally substituted (C₁-C₂₀) alkyl and optionally substituted (C₁-C₂₀) heteroalkyl;
[0282] (c)

[chemical structure]

wherein:
[0283] (c)(i) each R^{ZA}, R^{ZB} and R^{ZC} is independently selected from the group consisting of: optionally substituted (C₁-C₂₀) alkyl and optionally substituted (C₁-C₂₀) heteroalkyl,
[0284] (c)(ii) each R^{ZA} is independently selected from the group consisting of: optionally substituted (C₁-C₂₀) alkyl and optionally substituted (C₁-C₂₀) heteroalkyl, and each R^{ZB} and R^{ZC} come together with the N atom to which they are attached to form an optionally substituted (C₃-C₁₄) heterocyclic ring, or
[0285] (c)(iii) each R^{ZA}, R^{ZB} and R^{ZC} come together with the N atom to which they are attached to form an optionally substituted (C₅-C₁₀) bicyclic heterocyclic ring;
[0286] (d)

[chemical structure]

wherein:
[0287] (d)(i) each R^{ZA} and R^{ZB} is independently selected from the group consisting of: optionally substituted (C₁-C₂₀) alkyl and optionally substituted (C₁-C₂₀) heteroalkyl, and each R^{ZC} and R^{ZD} come together with the N atom to which they are attached to form an optionally substituted (C₃-C₁₄) heterocyclyl, or
[0288] (d)(ii) each R^{ZA} and R^{ZB} come together with the N atom to which they are attached to form an optionally substituted (C₃-C₁₄) heterocyclyl, and each R^{ZC} and R^{ZD} come together with the N atom to which they are attached to form an optionally substituted (C₃-C₁₄) heterocyclyl, or
[0289] (d)(iii) each R^{ZA} and R^{ZB} come together with the N atom to which they are attached to form an optionally substituted (C₃-C₁₄) heterocyclyl, and each R^{ZC} and R^{ZD} come together with the N atom to which they are attached to form an optionally substituted (C₃-C₁₄) heterocyclic ring;
[0290] (e)

[chemical structure]

wherein each R^{ZA} and R^{ZB} come together with the N atom to which they are attached to form an optionally substituted (C₅-C₁₄) heteroaromatic ring, and
[0291] (f)

[chemical structure]

wherein each R^{ZA} is independently selected from the group consisting of: optionally substituted (C₁-C₂₀) alkyl and optionally substituted (C₁-C₂₀) heteroalkyl, and each R^{ZB} and R^{ZC} come together with the N atom to which they are attached to form an optionally substituted (C₅-C₁₄) heteroaryl.

[0292] In some embodiments, each quaternary amine is independently selected from the group consisting of:
[0293] (a)

[chemical structure]

wherein each R^{ZA} is independently selected from the group consisting of: optionally substituted (C₁-C₁₆) alkyl and optionally substituted (C₁-C₈) heteroalkyl;
[0294] (b)

[chemical structure]

wherein each R^{ZA} and R^{ZB} is independently selected from the group consisting of: optionally substituted (C₁-C₁₆) alkyl and optionally substituted (C₁-C₈) heteroalkyl;
[0295] (c)

[chemical structure]

wherein:
[0296] (c)(i) each R^{ZA}, R^{ZB} and R^{ZC} is independently selected from the group consisting of: optionally substituted (C₁-C₁₆) alkyl and optionally substituted (C₁-C₈) heteroalkyl,
[0297] (c)(ii) each R^{ZA} is independently selected from the group consisting of: optionally substituted (C₁-C₁₆) alkyl and optionally substituted (C₁-C₈) heteroalkyl, and each R^{ZB} and R^{ZC} come together with the N atom to which they are attached to form an optionally substituted (C₆) heterocyclic ring, or
[0298] (c)(iii) each R^{ZA}, R^{ZB} and R^{ZC} come together with the N atom to which they are attached to form an optionally substituted (C₈) bicyclic heterocyclic ring;
[0299] (d)

[chemical structure]

wherein:
[0300] (d)(i) each R^{ZA} and R^{ZB} is independently selected from the group consisting of: optionally substituted (C₁-C₁₆) alkyl and optionally substituted (C₁-C₈) heteroalkyl, and each R^{ZC} and R^{ZD} come together with the N atom to which they are attached to form an optionally substituted (C₆) heterocyclyl, or
[0301] (d)(ii) each R^{ZA} and R^{ZB} come together with the N atom to which they are attached to form an optionally substituted (C₆) heterocyclyl, and each R^{ZC} and R^{ZD} come together with the N atom to which they are attached to form an optionally substituted (C₆) heterocyclyl, or
[0302] (d)(iii) each R^{ZA} and R^{ZB} come together with the N atom to which they are attached to form an optionally substituted (C₆) heterocyclyl, and each R^{ZC} and R^{ZD} come together with the N atom to which they are attached to form an optionally substituted (C₆) heterocyclic ring;
[0303] (e)

[chemical structure]

wherein each R^{ZA} and R^{ZB} come together with the N atom to which they are attached to form an optionally substituted (C₆) heteroaromatic ring; and
[0304] (f)

[chemical structure]

wherein each R^{ZA} is independently selected from the group consisting of: optionally substituted (C₁-C₁₆) alkyl and optionally substituted (C₁-C₈) heteroalkyl, and each R^{ZB} and R^{ZC} come together with the N atom to which they are attached to form an optionally substituted (C₆) heteroaryl.

[0305] In some embodiments, each quaternary amine is independently selected from the group consisting of:
[0306] (a)

[chemical structure]

wherein each R^{ZA} is independently selected from the group consisting of: optionally substituted (C₁-C₁₆) alkyl and optionally substituted (C₁-C₈) heteroalkyl;
[0307] (b)

[chemical structure]

wherein each R^{ZA} and R^{ZB} is independently selected from the group consisting of: optionally substituted (C₁-C₁₆) alkyl and optionally substituted (C₁-C₈) heteroalkyl;
[0308] (c)

[chemical structure]

wherein:
[0309] (c)(i) each R^{ZA}, R^{ZB} and R^{ZC} is independently selected from the group consisting of: optionally substituted (C₁-C₁₆) alkyl and optionally substituted (C₁-C₈) heteroalkyl,
[0310] (c)(ii) each R^{ZA} is independently selected from the group consisting of: optionally substituted (C₁-C₃) alkyl and optionally substituted (C₁-C₃) heteroalkyl, and each R^{ZB} and R^{ZC} come together with the N atom to which they are attached to form an optionally substituted (C₆) heterocyclic ring, or
[0311] (c)(iii) each R^{ZA}, R^{ZB} and R^{ZC} come together with the N atom to which they are attached to form an optionally substituted (C₈) bicyclic heterocyclic ring;
[0312] (d)

[chemical structure]

wherein:
[0313] (d)(i) each R^{ZA} and R^{ZB} is independently selected from the group consisting of: optionally substituted (C₁-C₃) alkyl and optionally substituted (C₁-C₃) heteroalkyl, and each R^{ZC} and R^{ZD} come together with the N atom to which they are attached to form an optionally substituted (C₆) heterocyclyl, or
[0314] (d)(ii) each R^{ZA} and R^{ZB} come together with the N atom to which they are attached to form an optionally substituted (C₆) heterocyclyl, and each R^{ZC} and R^{ZD} come together with the N atom to which they are attached to form an optionally substituted (C₆) heterocyclyl, or
[0315] (d)(iii) each R^{ZA} and R^{ZB} come together with the N atom to which they are attached to form an optionally substituted (C₆) heterocyclyl, and each R^{ZC} and R^{ZD} come together with the N atom to which they are attached to form an optionally substituted (C₆) heterocyclic ring;
[0316] (e)

[chemical structure]

wherein each R^{ZA} and R^{ZB} come together with the N atom to which they are attached to form an optionally substituted (C₆) heteroaromatic ring; and
[0317] (f)

[chemical structure]

wherein each R^{ZA} is independently selected from the group consisting of: optionally substituted (C₁-C₃) alkyl and optionally substituted (C₁-C₃) heteroalkyl, and each R^{ZB} and R^{ZC} come together with the N atom to which they are attached to form an optionally substituted (C) heteroaryl.

[0318] In some embodiments, when each R^{ZA}, R^{ZB} and/or R^{ZC}, when present, is/are an optionally substituted alkyl, each optionally substituted alkyl is unsubstituted.

[0319] In some embodiments, when each R^{ZA}, R^{ZB} and/or R^{ZC}, when present, is/are an optionally substituted heteroalkyl, each optionally substituted heteroalkyl is unsubstituted.

[0320] In some embodiments, when each R^{ZB} and R^{ZC} come together with the N atom to which they are attached to form an optionally substituted heterocyclic ring, the optionally substituted heterocyclic ring is unsubstituted or substituted with one or more substitutents independently selected from the group consisting of Fluoro and (C₁-C₃) alkyl.

[0321] In some embodiments, when each R^{ZA}, R^{ZB} and R^{ZC} come together with the N atom to which they are attached to form an optionally substituted bicyclic heterocyclic ring, the optionally substituted bicyclic heterocyclic ring is unsubstituted.

[0322] In some embodiments, when each R^{ZA} and R^{ZB} come together with the N atom to which they are attached to form an optionally substituted heterocyclyl, the optionally substituted heterocyclyl is unsubstituted.

[0323] In some embodiments, when each R^{ZB} and R^{ZC} come together with the N atom to which they are attached to form an optionally substituted heteroaryl, the optionally substituted heteroaryl is unsubstituted.

[0324] In some embodiments, when each R^{ZC} and R^{ZD} come together with the N atom to which they are attached to form an optionally substituted heterocyclyl, the optionally substituted heterocyclyl is unsubstituted.

[0325] In some embodiments, when each R^{ZC} and R^{ZD} come together with the N atom to which they are attached to form an optionally substituted heterocyclic ring, the optionally substituted heterocyclic ring is unsubstituted.

[0326] In some embodiments, when each R^{ZA} and R^{ZB} come together with the N atom to which they are attached to form an optionally substituted heteroaromatic ring, the optionally substituted heteroaromatic ring is unsubstituted.

[0327] In some embodiments, each quaternary amine is independently selected from the group consisting of:

[chemical structure]

[0328] In some embodiments, each quaternary amine has an AN⁻counterion that is the same for each quaternary amine and is selected from the group consisting of: acetate, adipate, benzoate, benzenesulfonate, citrate, decanoate, chloride, lactate, maleate, methanesulfonate, oxalate, pivalate, propionate, succinate, sulfate, tartrate, or trifluoroacetate.

[0329] In some embodiments, at least one of the amino acid residues at positions Z³, Z⁵, Z⁶, Z⁷, Z⁸, Z¹⁰, Z¹¹, Z¹², Z¹³, Z¹⁴, Z¹⁵ and/or Z¹⁶, when an amino acid residue is present at the position, each independently comprise(s) at least one masked amine and/or masked amide.

[0330] In some embodiments, at least one of the amino acid residues at positions Z³, Z⁵, Z⁶, Z⁷, Z⁸, Z¹⁰, Z¹¹, Z¹², Z¹³, Z¹⁴, Z¹⁵ and/or Z¹⁶, when an amino acid residue is present at the position, each independently comprise(s) a masked amine and/or masked amide.

[0331] In some embodiments, at least one of the amino acid residues at positions Z⁵, Z⁷, Z⁸, Z¹⁰, Z¹³, Z¹⁴, Z¹⁵ and/or Z¹⁶, when an amino acid residue is present at the position, each independently comprise(s) at least one masked amine and/or masked amide.

[0332] In some embodiments, at least one of the amino acid residues at positions Z⁵, Z⁷, Z⁸, Z¹⁰, Z¹³, Z¹⁴, Z¹⁵ and/or Z¹⁶, when an amino acid residue is present at the position, each independently comprise(s) a masked amine and/or masked amide.

[0333] In some embodiments, at least one of the amino acid residues at positions Z⁵, Z⁸, and/or Z¹³, each independently comprise(s) at least one masked amine and/or masked amide.

[0334] In some embodiments, at least one of the amino acid residues at positions Z⁵, Z⁸, and/or Z¹³, each independently comprise(s) a masked amine and/or masked amide.

[0335] In some embodiments, the amino acid residue at position Z⁵ comprises at least one masked amine and/or masked amide.

[0336] In some embodiments, the amino acid residue at position Z⁵ comprises a masked amine and/or masked amide.

[0337] In some embodiments, the amino acid residue at position Z⁸ comprises at least one masked amine and/or masked amide.

[0338] In some embodiments, the amino acid residue at position Z⁸ comprises a masked amine and/or masked amide.

[0339] In some embodiments, the amino acid residue at position Z¹³ comprises at least one masked amine and/or masked amide.

[0340] In some embodiments, the amino acid residue at position Z¹³ comprises a masked amine and/or masked amide.

[0341] In some embodiments, at least one of the masked amine(s) is an amine in a backbone amide, wherein each amine in a backbone amide is independently substituted with (C₁-C₃) alkyl.

[0342] In some embodiments, at least one of the masked amine(s) and/or masked amide(s) is present in the side chain of the amino acid residue comprising said masked amine and/or masked amide(s).

[0343] In some embodiments, at least one of the masked amine(s) and/or masked amide(s) is independently selected from the group consisting of:
[0344] (a)

[chemical structure]

wherein each R^{YA} is independently selected from the group consisting of: optionally substituted (C₁-C₁₀) alkyl and optionally substituted (C₁-C₂₀) heteroalkyl, and each R^{YB} is independently selected from the group consisting of: hydrogen, optionally substituted (C₁-C₁₀) alkyl and optionally substituted (C₁-C₂₀) heteroalkyl;
[0345] (b)

[chemical structure]

wherein each R^{YC} is independently selected from the group consisting of: optionally substituted (C₁-C₁₀) alkyl and optionally substituted (C₁-C₂₀) heteroalkyl, and each R^{YD} is independently selected from the group consisting of: hydrogen, optionally substituted (C₁-C₁₀) alkyl and optionally substituted (C₁-C₂₀) heteroalkyl;
[0346] (c)

[chemical structure]

wherein each R^{YE} is independently selected from the group consisting of: optionally substituted (C₁-C₁₀) alkyl and optionally substituted (C₁-C₂₀) heteroalkyl, and each R^{YF} is independently selected from the group consisting of: hydrogen, optionally substituted (C₁-C₁₀) alkyl and optionally substituted (C₁-C₂₀) heteroalkyl; and
[0347] (d)

[chemical structure]

wherein each R^{YG} and R^{YH} is independently selected from the group consisting of: optionally substituted (C₁-C₁₀) alkyl and optionally substituted (C₁-C₂₀) heteroalkyl.

[0348] In some embodiments, at least one of the masked amine(s) and/or masked amides is independently selected from the group consisting of:
[0349] (a)

[chemical structure]

wherein each R^{YA} is independently selected from the group consisting of: optionally substituted (C₁-C₅) alkyl and optionally substituted (C₁-C₁₅) heteroalkyl, and each R^{YB} is independently selected from the group consisting of hydrogen, optionally substituted (C₁-C₅) alkyl and optionally substituted (C₁-C₁₅) heteroalkyl;
[0350] (b)

[chemical structure]

wherein each R^{YC} is independently selected from the group consisting of optionally substituted (C₁-C₅) alkyl and optionally substituted (C₁-C₁₅) heteroalkyl, and each R^{YD} is independently selected from the group consisting of hydrogen, optionally substituted (C₁-C₅) alkyl and optionally substituted (C₁-C₁₅) heteroalkyl;
[0351] (c)

[chemical structure]

wherein each R^{YE} is independently selected from the group consisting of optionally substituted (C₁-C₅) alkyl and optionally substituted (C₁-C₁₅) heteroalkyl, and each R^{YF} is independently selected from the group consisting of hydrogen, optionally substituted (C₁-C₅) alkyl and optionally substituted (C₁-C₁₅) heteroalkyl; and
[0352] (d)

[chemical structure]

wherein each R^{YG} and R^{YH} is independently selected from the group consisting of optionally substituted (C₁-C₅) alkyl and optionally substituted (C₁-C₁₅) heteroalkyl.

[0353] In some embodiments, when each R^{YA}, R^{YB}, R^{YC}, R^{YD}, R^{YE}, R^{YF}, R^{YG} and/or R^{YH} is optionally substituted alkyl, each optionally substituted alkyl is independently unsubstituted or substituted with one or more substitutents independently selected from the group consisting of —CO₂H and a quaternary amine as described herein, for example, —N⁺(CH₃)₃.

[0354] In some embodiments, when each R^{YA}, R^{YB}, R^{YC}, R^{YD}, R^{YE}, R^{YF}, R^{YG} and/or R^{YH} is optionally substituted heteroalkyl, each optionally substituted heteroalkyl is independently unsubstituted or substituted with one or more substitutents independently selected from the group consisting of: —CO₂H and a quaternary amine as described herein, for example, —N⁺(CH₃)₃.

[0355] In some embodiments, at least one of the masked amine(s) and/or masked amide(s) is independently selected from the group consisting of:

[chemical structure]

[chemical structure]

[0356] In some embodiments, the at least one amino acid residue(s) each independently comprising at least one masked amine and/or masked amide is/are independently selected from the group consisting of: NMe7MeW, AAMPhe, Paf(Ac), AEF(Ac), AcAEF, AEF(AcCh), AEF(Me)2, AEF(N(Me)2), AEF(MePrpa), AEF(NMe), Dab(NMeAc), Dab(NMecarn), Dab(NMeCOmPEG6), Dab(NMecPEG2a), Dab(NMecPEG3a), Dab(NMecPEG5a), Dab(NMecPEG5aCO)-, Dap(Ac), Dap(NMeAc), K(Ac), K(NMeAc), K(NMeCOmPEG6), K(NMeCOPEG4N+Me3), K(NMeCOPEG5a), K(NMecPEG5a), K(NMePEG5a), K(NMePEG3a), K(NmPEG6Ac), NMe3Pya, NMebAla, NMeDTyr, N(N(Me)), N(NMe), N(N(Me)2), Q(N(Me)2), Q(NHtBu) and Tetrazole(NMe).

[0357] In some embodiments, the at least one amino acid residue(s) each independently comprising at least one masked amine is not K(Ac).

[0358] In some embodiments, when the amino acid residue at position Z³ is replaced with an amino acid residue that is different from the amino acid residue recited at said position, the amino acid residue at position Z³ is replaced with an amino acid residue selected from the group consisting of: APEG2ser, APEG2Ser, APEG2Ser(S*), e(c), e(C), hk(Me)₃, k(5cpa), k(cPEG3a), k(d), k(D), k(dPEG12Ac), k(dPEG6Ac), k(dPEG9Ac), k(Me)₃, K(Me)₃, k(PEG2PEG2gEC12), k(PEG2PEG2gEC14), k(PEG2PEG2PEG2PEG2gEC12), k(PEG2PEG6gEC12), SP6, APEG2Ser(RS), gPEG2Ser and k(PEG2PEG2gE(c)C12.

[0359] In some embodiments, when the amino acid residue at position Z³ is replaced with an amino acid residue that is different from the amino acid residue recited at said position, the amino acid residue at position Z³ is replaced with an amino acid residue comprising at least one quaternary amine selected from the group consisting of: APEG2ser, APEG2Ser, e(c), e(C), hk(Me)₃, k(5cpa), k(cPEG3a), k(d), k(D), K(Me)₃ and k(Me)₃.

[0360] In some embodiments, when the amino acid residue at position Z³ is replaced with an amino acid residue that is different from the amino acid residue recited at said position, the amino acid residue at position Z³ is replaced with an amino acid residue that is r substituted on the side chain with one or more groups selected from: —OH, —(C₁-C₄) alkyl, —O(C₁-C₄) alkyl, and —CN.

[0361] In some embodiments, when the amino acid residue at position Z³ is replaced with an amino acid residue that is different from the amino acid residue recited at said position, the amino acid residue at position Z³ is replaced with a hydrophilic amino acid residue.

[0362] In some embodiments, when the amino acid residue at position Z³ is replaced with an amino acid residue that is different from the amino acid residue recited at said position, the amino acid residue at position Z³ is replaced with a basic amino acid residue.

[0363] In some embodiments, when the amino acid residue at position Z³ is replaced with an amino acid residue that is different from the amino acid residue recited at said position, the amino acid residue at position Z³ is replaced with an acidic amino acid residue.

[0364] In some embodiments, the amino acid residue at position Z³ is replaced with an amino acid residue that is different from the amino acid residue recited at said position.

[0365] In some embodiments, the amino acid residue at position Z⁴ is the residue of Abu or the residue of an amino acid comprising a sulfhydryl group selected from the group consisting of: Pen, C or aMeC.

[0366] In some embodiments, the amino acid residue at position Z⁴ is the residue of Pen.

[0367] In some embodiments, when the amino acid residue at position Z⁵ is replaced with an amino acid residue that is different from the amino acid residue recited at said position, the amino acid residue at position Z⁵ is replaced with an amino acid residue selected from the group consisting of: A, APEG2Ser(S*), Dab(Me)₃, F, Gab, K(cPEG3a), K(Me)₃, K(PEG2PEG2gEC12), K(PEG2PEG2gEC14), L, N, N(N(Me)), N(NMe), Q and W.

[0368] In some embodiments, when the amino acid residue at position Z⁵ is replaced with an amino acid residue that is different from the amino acid residue recited at said position, the amino acid residue at position Z⁵ is replaced with an amino acid residue comprising at least one quaternary amine selected from the group consisting of: APEG2Ser(S*), Dab(Me)₃, K(cPEG3a) and K(Me)₃.

[0369] In some embodiments, when the amino acid residue at position Z⁵ is replaced with an amino acid residue that is different from the amino acid residue recited at said position, the amino acid residue at position Z⁵ is replaced with an amino acid residue that is N(N(Me)₂) substituted on the side chain with one or more groups selected from: —OH, —(C₁-C₄) alkyl, —O(C₁-C₄) alkyl, and —CN.

[0370] In some embodiments, when the amino acid residue at position Z⁵ is replaced with an amino acid residue that is different from the amino acid residue recited at said position, the amino acid residue at position Z⁵ is replaced with an aromatic amino acid residue.

[0371] In some embodiments, when the amino acid residue at position Z⁵ is replaced with an amino acid residue that is different from the amino acid residue recited at said position, the amino acid residue at position Z⁵ is replaced with an aliphatic amino acid residue.

[0372] In some embodiments, when the amino acid residue at position Z⁵ is replaced with an amino acid residue that is different from the amino acid residue recited at said position, the amino acid residue at position Z⁵ is replaced with a hydrophilic amino acid residue.

[0373] In some embodiments, when the amino acid residue at position Z⁵ is replaced with an amino acid residue that is different from the amino acid residue recited at said position, the amino acid residue at position Z⁵ is replaced with a basic amino acid residue.

[0374] In some embodiments, when the amino acid residue at position Z⁵ is replaced with an amino acid residue that is different from the amino acid residue recited at said position, the amino acid residue at position Z⁵ is replaced with an acidic amino acid residue.

[0375] In some embodiments, the amino acid residue at position Z⁵ is replaced with an amino acid residue that is different from the amino acid residue recited at said position.

[0376] In some embodiments, when the amino acid residue at position Z⁶ is replaced with an amino acid residue that is different from the amino acid residue recited at said position, the amino acid residue at position Z⁶ is replaced with an amino acid residue selected from the group consisting of: A and L.

[0377] In some embodiments, when the amino acid residue at position Z⁶ is replaced with an amino acid residue that is different from the amino acid residue recited at said position, the amino acid residue at position Z⁶ is replaced with an amino acid residue that is T substituted on the side chain with one or more groups selected from: —OH, —(C₁-C₄) alkyl, —O(C₁-C₄) alkyl, and —CN.

[0378] In some embodiments, when the amino acid residue at position Z⁶ is replaced with an amino acid residue that is different from the amino acid residue recited at said position, the amino acid residue at position Z⁶ is replaced with an aliphatic amino acid residue.

[0379] In some embodiments, when the amino acid residue at position Z⁶ is replaced with an amino acid residue that is different from the amino acid residue recited at said position, the amino acid residue at position Z⁶ is replaced with a polar amino acid residue.

[0380] In some embodiments, the amino acid residue at position Z⁶ is replaced with an amino acid residue that is different from the amino acid residue recited at said position.

[0381] In some embodiments, when the amino acid residue at position Z⁷ is replaced with an amino acid residue that is different from the amino acid residue recited at said position, the amino acid residue at position Z⁷ is replaced with an amino acid residue selected from the group consisting of: W, 7(3NAcPh)W, 7CF3W, NMe7MeW, 2Nal, A, F and L.

[0382] In some embodiments, when the amino acid residue at position Z⁷ is replaced with an amino acid residue that is different from the amino acid residue recited at said position, the amino acid residue at position Z⁷ is replaced with an amino acid residue that is 7MeW substituted on the side chain with one or more groups selected from: —OH, —(C₁-C₄) alkyl, —O(C₁-C₄) alkyl, and —CN.

[0383] In some embodiments, when the amino acid residue at position Z⁷ is replaced with an amino acid residue that is different from the amino acid residue recited at said position, the amino acid residue at position Z⁷ is replaced with an aromatic amino acid residue.

[0384] In some embodiments, when the amino acid residue at position Z⁷ is replaced with an amino acid residue that is different from the amino acid residue recited at said position, the amino acid residue at position Z⁷ is replaced with an aliphatic amino acid residue.

[0385] In some embodiments, the amino acid residue at position Z⁷ is replaced with an amino acid residue that is different from the amino acid residue recited at said position.

[0386] In some embodiments, when the amino acid residue at position Z⁸ is replaced with an amino acid residue that is different from the amino acid residue recited at said position, the amino acid residue at position Z⁸ is replaced with an amino acid residue selected from the group consisting of: K(NMeAC), K(NMeAc), Q, 4AmPhe, A, AIB, APEG2Ser, APEG2Ser(R*), APEG2Ser(S*), Cit, Dab(NMeAc), Dab(NMecarn), Dab(NMeCarn), Dab(NMeCOmPEG6), Dab(NMecPEG2a), Dab(NMecPEG3a), Dab(NMecPEG5a), Dap(NMeAc), F, K(4cpg), K(Ac), K(cPEG3a), K(Me)₃, K(NMeCOmPEG6), K(NMePEG3a), K(NmPEG6Ac), K(PEG2PEG2gEC12), K(PEG2PEG2gEC14), L, Paf(Ac), Q(N(Me)2), Q(NHtBu), W, Y and K(cPEG3aCO).

[0387] In some embodiments, when the amino acid residue at position Z⁸ is replaced with an amino acid residue that is different from the amino acid residue recited at said position, the amino acid residue at position Z⁸ is replaced with an amino acid residue comprising at least one quaternary amine selected from the group consisting of: APEG2Ser, APEG2ser, APEG2Ser(R*), APEG2Ser(S*), Dab(NMecarn), Dab(NMeCarn), Dab(NMecPEG2a), Dab(NMecPEG3a), Dab(NMecPEG5a), K(cPEG3a), K(Me)₃ and K(NMePEG3a).

[0388] In some embodiments, when the amino acid residue at position Z⁸ is replaced with an amino acid residue that is different from the amino acid residue recited at said position, the amino acid residue at position Z⁸ is replaced with an amino acid residue that is K(NMeAc) substituted on the side chain with one or more groups selected from: —OH, —(C₁-C₄) alkyl, —O(C₁-C₄) alkyl, and —CN.

[0389] In some embodiments, when the amino acid residue at position Z⁸ is replaced with an amino acid residue that is different from the amino acid residue recited at said position, the amino acid residue at position Z⁸ is replaced with an aromatic amino acid residue.

[0390] In some embodiments, when the amino acid residue at position Z⁸ is replaced with an amino acid residue that is different from the amino acid residue recited at said position, the amino acid residue at position Z⁸ is replaced with an aliphatic amino acid residue.

[0391] In some embodiments, when the amino acid residue at position Z⁸ is replaced with an amino acid residue that is different from the amino acid residue recited at said position, the amino acid residue at position Z⁸ is replaced with a hydrophilic amino acid residue.

[0392] In some embodiments, when the amino acid residue at position Z⁸ is replaced with an amino acid residue that is different from the amino acid residue recited at said position, the amino acid residue at position Z⁸ is replaced with a basic amino acid residue.

[0393] In some embodiments, when the amino acid residue at position Z⁸ is replaced with an amino acid residue that is different from the amino acid residue recited at said position, the amino acid residue at position Z⁸ is replaced with an acidic amino acid residue.

[0394] In some embodiments, the amino acid residue at position Z⁸ is replaced with an amino acid residue that is different from the amino acid residue recited at said position.

[0395] In some embodiments, the amino acid residue at position Z⁹ is the residue of an amino acid comprising a sulfhydryl group selected from the group consisting of: Pen, C or aMeC.

[0396] In some embodiments, the amino acid residue at position Z⁹ is the residue of Pen.

[0397] In some embodiments, when the amino acid residue at position Z¹⁰ is replaced with an amino acid residue that is different from the amino acid residue recited at said position, the amino acid residue at position Z¹⁰ is replaced with an amino acid residue selected from the group consisting of: AEF, 4DMPEF, 4DMPzEF, 4TMABYF, ACHMF, AEF((Ch)cPEG3a), AEF(Ac), AEF(AcCh), AEF(aPEG2a), AEF(BisMEP), AEF(BisMEPa), AEF(BisPEG2a)(RS), AEF(BisPEG2a)(S*), AEF(G), AEF(Me)2, AEF(MEP), AEF(MePrpa), AEF(N(Me)2), AEF(NHCh), AEF(NHcPEG3a), AEF(NMe), AEF(NMe2mPEG3), AEF(NMe3), AEF(NMeBismPEG3), AEF(NMePEG2a), AEF(NmPEG6), AEF(NsCh), AEF(PEG2a), AEF(SPD), APEG2F, APEG3F, dFPPEG3F, Diazabiclyclooctane6F, DMMMF, DMPMF, DMTASF, F(4G), F(4N3), F(4TzlDMA4mPEG), F(4TzlMME), F(4TzlMMol), F(4TzlMMo3), F(4TzlMMo4), F(4TzlTMA1), F(4TzlTMA2), F(4TzlTMA3), F(4TzlTMA4), F(4TzlTMA5), GPEG3F, hFTMAPF, MMoEF, MMoPF, MMPEG3F, morfTMA4F, mPEG2TMA2F, mPEG2TMA4F, mPEG3TMA4F, MPzPEG3F, MTASF, NPyEF, NPyPEG3F, PiperazinequatF, TBAPEG3F, TMA3F, TMA4F, TMA6F, TMA8F, Tzl(Ch), TzlChmPEG, TzlChmPEG3, Y(C₉₀H), Y(OEOXIMECh), Y(OTzlCh), Y(OTzlChC16), Y(OTzlChC8), Y(OTzlC1aC8), Y(OTzlChmPEG), Y(OTzlChmPEG3), Y(OTzlPEG3a), Y(OTzlPEG4a), Y(OTzlTMA4), Y(OZOXIMECh), YC8CO(NHPEG3a), YC8COPip, YCF2H, ACHMF(R*, S*), ACHMF(S*, S*), AEF(cPEG3a), APF, F(4TzlAme2), F(4TzlG2), F(4TzlMMo7) and F(4TzlTMA7).

[0398] In some embodiments, when the amino acid residue at position Z¹⁰ is replaced with an amino acid residue that is different from the amino acid residue recited at said position, the amino acid residue at position Z¹⁰ is replaced with an amino acid residue comprising at least one quaternary amine selected from the group consisting of: 4DMPEF, 4DMPzEF, 4TMABYF, ACHMF, ACHMF(R*, S*), ACHMF(S*, S*), AEF((Ch)cPEG3a), AEF(AcCh), AEF(aPEG2a), AEF(cPEG3a), AEF(BisMEPa), AEF(BisPEG2a)(RS), AEF(BisPEG2a)(S*), AEF(MePrpa), AEF(NHcPEG3a), AEF(NMe2mPEG3), AEF(NMe3), AEF(NMeBismPEG3), AEF(NMePEG2a), AEF(NsCh), AEF(NHCh), AEF(PEG2a), AEF(SPD), APEG2F, APEG3F, dFPPEG3F, Diazabiclyclooctane6F, DMMMF, DMPMF, DMTASF, F(4TzlDMA4mPEG), F(4TzlMMol), F(4TzlMMo3), F(4TzlMMo4), F(4TzlTMA1), F(4TzlTMA2), F(4TzlTMA3), F(4TzlTMA4), F(4TzlTMA5), F(4TzlMMo7), F(4TzlTMA7), hFTMAPF, MMoEF, MMoPF, MMPEG3F, morfTMA4F, mPEG2TMA2F, mPEG2TMA4F, mPEG3TMA4F, MPzPEG3F, MTASF, NPyEF, NPyPEG3F, PiperazinequatF, TBAPEG3F, TMA3F, TMA4F, TMA6F, TMA8F, Tzl(Ch), TzlChmPEG, TzlChmPEG3, Y(OEOXIMECh), Y(OTzlCh), Y(OTzlChC16), Y(OTzlChC8), Y(OTzlC1aC8), Y(OTzlChmPEG), Y(OTzlChmPEG3), Y(OTzlPEG3a), Y(OTzlPEG4a), Y(OTzlTMA4), Y(OZOXIMECh) and YC8CO(NHPEG3a).

[0399] In some embodiments, when the amino acid residue at position Z¹⁰ is replaced with an amino acid residue that is different from the amino acid residue recited at said position, the amino acid residue at position Z¹⁰ is replaced with an amino acid residue that is TMAPF substituted on the side chain with one or more groups selected from: —OH, —(C₁-C₄) alkyl, —O(C₁-C₄) alkyl, and —CN.

[0400] In some embodiments, when the amino acid residue at position Z¹⁰ is replaced with an amino acid residue that is different from the amino acid residue recited at said position, the amino acid residue at position Z¹⁰ is replaced with an amino acid residue having the following structure:

[chemical structure]

[0401] wherein:

[0402] Ln¹ is selected from the group consisting of: an —O— atom,

[chemical structure]

wherein the right hand side of each depicted structure is bound to Ln²;
[0403] Ln² is a linker moiety comprising:
[0404] (i) at least 4 atoms, for example an optionally substituted alkylene comprising at least C₄ atoms, an optionally substituted heteroalkylene comprising at least C₄ atoms, an optionally substituted heteroalkenylene comprising at least C₄ atoms, an optionally substituted alkynylene comprising at least C₄ atoms, an optionally substituted alkylene—optionally substituted carbocyclyl comprising at least C₄ atoms, or an optionally substituted alkylene—optionally substituted heterocyclyl comprising at least C₄ atoms, for example optionally substituted (C₄-C₂₀) alkylene, optionally substituted (C₄-C₂₀) heteroalkylene, optionally substituted (C₄-C₂₀) heteroalkenylene, optionally substituted (C₄-C₂₀) alkynylene, optionally substituted (C₁-C₃) alkylene —optionally substituted (C₃-C₁₀) carbocyclyl, or optionally substituted (C₁-C₃) alkylene—optionally substituted (C₃-C₁₄) heterocyclyl, or
[0405] (ii) at least 2 atoms when Ln¹ is

[chemical structure]

for example an optionally substituted alkylene comprising at least C₂ atoms or an optionally substituted heteroalkylene comprising at least C₂ atoms, for example optionally substituted (C₂-C₂₀) alkylene or optionally substituted (C₂-C₂₀) heteroalkylene; and
[0406] Qu¹ is a quaternary amine.

[0407] In some embodiments, when the amino acid residue at position Z¹⁰ is replaced with an amino acid residue that is different from the amino acid residue recited at said position, the amino acid residue at position Z¹⁰ is replaced with an amino acid residue having the following structure:

[chemical structure]

[0408] wherein Ln¹, Ln² and Qu¹ are as defined herein.

[0409] In some embodiments, Qu¹ is a quaternary amine as defined herein.

[0410] In some embodiments, Ln¹ is an —O— atom.

[0411] In some embodiments, Ln² is selected from the group consisting of: optionally substituted (C₄-C₁₅) alkylene, optionally substituted (C₄-C₁₅) heteroalkylene, optionally substituted (C₄-C₁₅) heteroalkenylene, optionally substituted (C₄-C₁₅) alkynylene, optionally substituted (C₁-C₃) alkylene—optionally substituted (C₅-C₇) carbocyclyl, or optionally substituted (C₁-C₃) alkylene—optionally substituted (C₅-C₇) heterocyclyl.

[0412] In some embodiments, Ln² is selected from the group consisting of: optionally substituted (C₄-C₁₀) alkylene, optionally substituted (C₄-C₁₀) heteroalkylene, optionally substituted (C₄-C₁₀) heteroalkenylene, optionally substituted (C₄-C₁₀) alkynylene, optionally substituted (C₁-C₃) alkylene—optionally substituted (C₆) carbocyclyl, or optionally substituted (C₁-C₃) alkylene—optionally substituted (C₆) heterocyclyl.

[0413] In some embodiments, Ln² is selected from the group consisting of: optionally substituted (C₄-C₈) alkylene, optionally substituted (C₄-C₈) heteroalkylene, optionally substituted (C₄-C₈) heteroalkenylene, optionally substituted (C₄-C₈) alkynylene, optionally substituted (C₁-C₃) alkylene—optionally substituted (C₆) carbocyclyl, or optionally substituted (C₁-C₃) alkylene—optionally substituted (C₆) heterocyclyl.

[0414] In some embodiments, when Ln¹ is

[chemical structure]

Ln² is selected from the group consisting of optionally substituted (C₂-C₁₅) alkylene or optionally substituted (C₂-C₁₅) heteroalkylene.

[0415] In some embodiments, when Ln¹ is

[chemical structure]

Ln² is selected from the group consisting of optionally substituted (C₂-C₁₀) alkylene or optionally substituted (C₂-C₁₀) heteroalkylene.

[0416] In some embodiments, when Ln¹ is

[chemical structure]

Ln² is selected from the group consisting of optionally substituted (C₂-C₅) alkylene or optionally substituted (C₂-C₅) heteroalkylene.

[0417] In some embodiments, when Ln² is optionally substituted alkylene, the optionally substituted alkylene is unsubstituted or is substituted with one or more substituents independently selected from the group consisting of Fluoro.

[0418] In some embodiments, when Ln² is optionally substituted heteroalkylene, the optionally substituted heteroalkylene is unsubstituted or is substituted with one or more substituents independently selected from the group consisting of: (C₁-C₃) alkyl,

[chemical structure]

═O (i.e., two geminal hydrogens on a carbon atom of the heteroalkylene are replaced with the group ═O), or a quaternary amine described herein, for example, —N⁺(CH₃)₃.

[0419] In some embodiments, when Ln² is optionally substituted heteroalkenylene, the optionally substituted heteroalkenylene is unsubstituted.

[0420] In some embodiments, when Ln² is optionally substituted alkynylene, the optionally substituted alkynylene is unsubstituted.

[0421] In some embodiments, when Ln² is optionally substituted alkylene —optionally substituted carbocyclyl, the optionally substituted alkylene—optionally substituted carbocyclyl is unsubstituted.

[0422] In some embodiments, when Ln² is optionally substituted alkylene —optionally substituted heterocyclyl, the optionally substituted alkylene—optionally substituted heterocyclyl is unsubstituted.

[0423] In some embodiments, when the amino acid residue at position Z¹⁰ is replaced with an amino acid residue that is different from the amino acid residue recited at said position, the amino acid residue at position Z¹⁰ is replaced with an amino acid residue having the following structure:

[chemical structure]

[0424] wherein:
[0425] Ln³ is selected from the group consisting of: an —O— atom,

[chemical structure]

wherein the right hand side of each depicted structure is bound to Ln⁴;
[0426] Ln⁴ is a linker moiety comprising at least 2 atoms, for example an optionally substituted alkylene comprising at least C₂ atoms, an optionally substituted heteroalkylene comprising at least C₂ atoms, or an optionally substituted alkynylene comprising at least C₂ atoms, for example optionally substituted (C₂-C₂₀) alkylene, optionally substituted (C₂-C₂₀) heteroalkylene or optionally substituted (C₂-C₂₀) alkynylene; and Qu² is a (C₃-C₁₄) heterocyclyl quaternary amine, a (C₅-C₁₄) heteroaryl quaternary amine or a (C₅-C₁₄) bicyclic heterocyclyl quaternary amine, for example, a (C₃-C₁₄) heterocyclyl quaternary amine selected from the group consisting of:

[chemical structure]

a (C₅-C₁₄) heteroaryl quaternary amine selected from the group consisting of:

[chemical structure]

or a (C₅-C₁₄) bicyclic heterocyclyl quaternary amine selected from the group consisting of

[chemical structure]

[0427] In some embodiments, when the amino acid residue at position Z¹⁰ is replaced with an amino acid residue that is different from the amino acid residue recited at said position, the amino acid residue at position Z¹⁰ is replaced with an amino acid residue having the following structure:

[chemical structure]

[0428] wherein Ln³, Ln⁴ and Qu² are as defined herein.

[0429] In some embodiments, Qu² is a quaternary amine as defined herein.

[0430] In some embodiments, Ln³ is an —O— atom.

[0431] In some embodiments, Ln⁴ is selected from the group consisting of: optionally substituted (C₂-C₁₅) alkylene, optionally substituted (C₂-C₁₅) heteroalkylene or optionally substituted (C₂-C₁₅) alkynylene.

[0432] In some embodiments, Ln⁴ is selected from the group consisting of: optionally substituted (C₂-C₁₀) alkylene, optionally substituted (C₂-C₁₀) heteroalkylene or optionally substituted (C₂-C₁₀) alkynylene.

[0433] In some embodiments, Ln⁴ is selected from the group consisting of: optionally substituted (C₂-C₈) alkylene, optionally substituted (C₂-C₈) heteroalkylene or optionally substituted (C₂-C₈) alkynylene.

[0434] In some embodiments, when Ln⁴ is optionally substituted alkylene, the optionally substituted alkylene is unsubstituted or is substituted with one or more substituents independently selected from the group consisting of Fluoro.

[0435] In some embodiments, when Ln⁴ is optionally substituted heteroalkylene, the optionally substituted heteroalkylene is unsubstituted or is substituted with one or more substituents independently selected from the group consisting of: (C₁-C₃) alkyl,

[chemical structure]

═O (i.e., two geminal hydrogens on a carbon atom of the heteroalkylene are replaced with the group ═O), or a quaternary amine as described herein, for example, —N⁺(CH₃)₃.

[0436] In some embodiments, when Ln⁴ is optionally substituted alkynylene, the optionally substituted alkynylene is unsubstituted.

[0437] In some embodiments, when the amino acid residue at position Z¹⁰ is replaced with an amino acid residue that is different from the amino acid residue recited at said position, the amino acid residue at position Z¹⁰ is replaced with an aromatic amino acid residue.

[0438] In some embodiments, the amino acid residue at position Z¹⁰ is replaced with an amino acid residue that is different from the amino acid residue recited at said position.

[0439] In some embodiments, when the amino acid residue at position Z¹¹ is replaced with an amino acid residue that is different from the amino acid residue recited at said position, the amino acid residue at position Z¹¹ is replaced with an amino acid residue selected from the group consisting of A, F, L and W.

[0440] In some embodiments, when the amino acid residue at position Z¹¹ is replaced with an amino acid residue that is different from the amino acid residue recited at said position, the amino acid residue at position Z¹¹ is replaced with an amino acid residue that is 2Nal substituted on the side chain naphthalene ring with one or more groups selected from: —OH, —(C₁-C₄) alkyl, —O(C₁-C₄) alkyl, and —CN.

[0441] In some embodiments, when the amino acid residue at position Z¹¹ is replaced with an amino acid residue that is different from the amino acid residue recited at said position, the amino acid residue at position Z¹¹ is replaced with an aromatic amino acid residue.

[0442] In some embodiments, when the amino acid residue at position Z¹¹ is replaced with an amino acid residue that is different from the amino acid residue recited at said position, the amino acid residue at position Z¹¹ is replaced with an aliphatic amino acid residue.

[0443] In some embodiments, the amino acid residue at position Z¹¹ is replaced with an amino acid residue that is different from the amino acid residue recited at said position.

[0444] In some embodiments, when the amino acid residue at position Z¹² is replaced with an amino acid residue that is different from the amino acid residue recited at said position, the amino acid residue at position Z¹² is replaced with an amino acid residue selected from the group consisting of: A, Achx, Achx(diF), Acpx, Aib, AIB, aMeK, aMeL, Chg, diFCpx, F, L, Pip(NMe), Pip(NMe2), W and diFAchx.

[0445] In some embodiments, when the amino acid residue at position Z¹² is replaced with an amino acid residue that is different from the amino acid residue recited at said position, the amino acid residue at position Z¹² is replaced with an amino acid residue comprising at least one quaternary amine selected from the group consisting of: Pip(NMe2).

[0446] In some embodiments, when the amino acid residue at position Z¹² is replaced with an amino acid residue that is different from the amino acid residue recited at said position, the amino acid residue at position Z¹² is replaced with an amino acid residue that is THP substituted on the side chain with one or more groups selected from: —OH, —(C₁-C₄) alkyl, —O(C₁-C₄) alkyl, and —CN.

[0447] In some embodiments, when the amino acid residue at position Z¹² is replaced with an amino acid residue that is different from the amino acid residue recited at said position, the amino acid residue at position Z¹² is replaced with an aromatic amino acid residue.

[0448] In some embodiments, when the amino acid residue at position Z¹² is replaced with an amino acid residue that is different from the amino acid residue recited at said position, the amino acid residue at position Z¹² is replaced with an aliphatic amino acid residue.

[0449] In some embodiments, when the amino acid residue at position Z¹² is replaced with an amino acid residue that is different from the amino acid residue recited at said position, the amino acid residue at position Z¹² is replaced with a polar amino acid residue.

[0450] In some embodiments, when the amino acid residue at position Z¹² is replaced with an amino acid residue that is different from the amino acid residue recited at said position, the amino acid residue at position Z¹² is replaced with a hydrophilic amino acid residue.

[0451] In some embodiments, when the amino acid residue at position Z¹² is replaced with an amino acid residue that is different from the amino acid residue recited at said position, the amino acid residue at position Z¹² is replaced with a basic amino acid residue.

[0452] In some embodiments, the amino acid residue at position Z¹² is replaced with an amino acid residue that is different from the amino acid residue recited at said position.

[0453] In some embodiments, when the amino acid residue at position Z¹³ is replaced with an amino acid residue that is different from the amino acid residue recited at said position, the amino acid residue at position Z¹³ is replaced with an amino acid residue selected from the group consisting of: K(NMeAC), E, A, AIB, aMeE, APEG2Ser, APEG2Ser(S*), Cit, Dab(NMeAc), Dab(NMecarn), Dab(NMeCOmPEG6), Dab(NMecPEG2a), Dab(NMecPEG3a), Dap(Ac), Dap(NMeAc), E(c), E(C), F, K(5cpa), K(Ac), K(cPEG3a), K(d), K(D), K(dPEG12Ac), K(dPEG6Ac), K(dPEG9Ac), K(Me)₃, K(NMeCOmPEG6), K(NMeCOPEG4N+Me3), K(NMePEG3a), K(NmPEG6Ac), K(PEG2PEG2gEC12), K(PEG2PEG2gEC14), K(PEG2PEG2PEG2gEC12), L, Q(N(Me)2), Tetrazole, Tetrazole(NMe), W, K(DFN), K(IPB) and Nle.

[0454] In some embodiments, when the amino acid residue at position Z¹³ is replaced with an amino acid residue that is different from the amino acid residue recited at said position, the amino acid residue at position Z¹³ is replaced with an amino acid residue comprising at least one quaternary amine selected from the group consisting of: APEG2Ser, APEG2Ser(S*), Dab(NMecarn), Dab(NMecPEG2a), Dab(NMecPEG3a), K(5cpa), K(cPEG3a), E(c), E(C), K(d), K(D), K(Me)₃, K(NMeCOPEG4N+Me3) and K(NMePEG3a).

[0455] In some embodiments, when the amino acid residue at position Z¹³ is replaced with an amino acid residue that is different from the amino acid residue recited at said position, the amino acid residue at position Z¹³ is replaced with an amino acid residue that is K(NMeAc) substituted on the side chain with one or more groups selected from: —OH, —(C₁-C₄) alkyl, —O(C₁-C₄) alkyl, and —CN.

[0456] In some embodiments, when the amino acid residue at position Z¹³ is replaced with an amino acid residue that is different from the amino acid residue recited at said position, the amino acid residue at position Z¹³ is replaced with an aromatic amino acid residue.

[0457] In some embodiments, when the amino acid residue at position Z¹³ is replaced with an amino acid residue that is different from the amino acid residue recited at said position, the amino acid residue at position Z¹³ is replaced with an aliphatic amino acid residue.

[0458] In some embodiments, when the amino acid residue at position Z¹³ is replaced with an amino acid residue that is different from the amino acid residue recited at said position, the amino acid residue at position Z¹³ is replaced with a hydrophilic amino acid residue.

[0459] In some embodiments, when the amino acid residue at position Z¹³ is replaced with an amino acid residue that is different from the amino acid residue recited at said position, the amino acid residue at position Z¹³ is replaced with an acidic amino acid residue.

[0460] In some embodiments, the amino acid residue at position Z¹³ is replaced with an amino acid residue that is different from the amino acid residue recited at said position.

[0461] In some embodiments, when the amino acid residue at position Z¹⁴ is replaced with an amino acid residue that is different from the amino acid residue recited at said position, the amino acid residue at position Z¹⁴ is replaced with an amino acid residue selected from the group consisting of: K(Ac) and N(NMe).

[0462] In some embodiments, when the amino acid residue at position Z¹⁴ is replaced with an amino acid residue that is different from the amino acid residue recited at said position, the amino acid residue at position Z¹⁴ is replaced with an amino acid residue that is N substituted on the side chain with one or more groups selected from: —OH, —(C₁-C₄) alkyl, —O(C₁-C₄) alkyl, and —CN.

[0463] In some embodiments, when the amino acid residue at position Z¹⁴ is replaced with an amino acid residue that is different from the amino acid residue recited at said position, the amino acid residue at position Z¹⁴ is replaced with a hydrophilic amino acid residue.

[0464] In some embodiments, the amino acid residue at position Z¹⁴ is replaced with an amino acid residue that is different from the amino acid residue recited at said position.

[0465] In some embodiments, when the amino acid residue at position Z¹¹ is replaced with an amino acid residue that is different from the amino acid residue recited at said position, the amino acid residue at position Z¹¹ is replaced with an amino acid residue selected from the group consisting of 3pya, 5CF33Pya, 5MePyridinAla, bAla, dK, dL, F, f, H, h, k, N, NMe3Pya, NMebAla, NMeDTyr, orn, Paf, s, t, THP, v, y and A.

[0466] In some embodiments, when the amino acid residue at position Z⁵ is replaced with an amino acid residue that is different from the amino acid residue recited at said position, the amino acid residue at position Z⁵ is replaced with an amino acid residue that is 3Pya substituted on the side chain with one or more groups selected from: —OH, —(C₁-C₄) alkyl, —O(C₁-C₄) alkyl, and —CN.

[0467] In some embodiments, when the amino acid residue at position Z⁵ is replaced with an amino acid residue that is different from the amino acid residue recited at said position, the amino acid residue at position Z⁵ is replaced with an amino acid residue comprising at least one quaternary amine selected from the group consisting of: NMe3Pya.

[0468] In some embodiments, when the amino acid residue at position Z⁵ is replaced with an amino acid residue that is different from the amino acid residue recited at said position, the amino acid residue at position Z⁵ is replaced with an aromatic amino acid residue.

[0469] In some embodiments, when the amino acid residue at position Z⁵ is replaced with an amino acid residue that is different from the amino acid residue recited at said position, the amino acid residue at position Z⁵ is replaced with an aliphatic amino acid residue.

[0470] In some embodiments, when the amino acid residue at position Z⁵ is replaced with an amino acid residue that is different from the amino acid residue recited at said position, the amino acid residue at position Z⁵ is replaced with a polar amino acid residue.

[0471] In some embodiments, when the amino acid residue at position Z⁵ is replaced with an amino acid residue that is different from the amino acid residue recited at said position, the amino acid residue at position Z⁵ is replaced with a hydrophilic amino acid residue.

[0472] In some embodiments, when the amino acid residue at position Z¹¹ is replaced with an amino acid residue that is different from the amino acid residue recited at said position, the amino acid residue at position Z¹¹ is replaced with a basic amino acid residue.

[0473] In some embodiments, when the amino acid residue at position Z¹⁵ is replaced with an amino acid residue that is different from the amino acid residue recited at said position, the amino acid residue at position Z¹⁵ is replaced with a non-polar amino acid residue.

[0474] In some embodiments, the amino acid residue at position Z¹⁵ is replaced with an amino acid residue that is different from the amino acid residue recited at said position.

[0475] In some embodiments, when the amino acid residue at position Z¹⁶ is replaced with an amino acid residue that is different from the amino acid residue recited at said position, the amino acid residue at position Z¹⁶ is replaced with an amino acid residue selected from the group consisting of: 4diFPro, NMeDTyr, NMeK(PEG2PEG2C12), NMeK(PEG2PEG2C14), NMeK(PEG2PEG2gEC12), NMeK(PEG2PEG2gEC14), NMeK(PEG2PEG2K(PEG2PEG2gEC12)₂), NMeK(PEG2PEG2K(PEG2PEG2PEG2PEG2gEC12)₂), NMeK(PEG2PEG2PEG2gEC12), NMeK(PEG2PEG2PEG2PEG2gEC12), NMeK(PEG2PEG6gEC12), NMeK(PEG2PEG6gEC14), NMeK(SP6PEG2PEG2C12) and NMeK(SP6PEG2PEG2gEC12).

[0476] In some embodiments, when the amino acid residue at position Z¹⁶ is replaced with an amino acid residue that is different from the amino acid residue recited at said position, the amino acid residue at position Z¹⁶ is replaced with an amino acid residue comprising at least one quaternary amine selected from the group consisting of: NMeK(SP6PEG2PEG2C12) and NMeK(SP6PEG2PEG2gEC12).

[0477] In some embodiments, when the amino acid residue at position Z¹⁶ is replaced with an amino acid residue that is different from the amino acid residue recited at said position, the amino acid residue at position Z¹⁶ is replaced with an amino acid residue that is Sar substituted on the side chain with one or more groups selected from: —OH, —(C₁-C₄) alkyl, —O(C₁-C₄) alkyl, and —CN.

[0478] In some embodiments, when the amino acid residue at position Z¹⁶ is replaced with an amino acid residue that is different from the amino acid residue recited at said position, the amino acid residue at position Z¹⁶ is replaced with an aromatic amino acid residue.

[0479] In some embodiments, when the amino acid residue at position Z¹⁶ is replaced with an amino acid residue that is different from the amino acid residue recited at said position, the amino acid residue at position Z¹⁶ is replaced with an acidic amino acid residue.

[0480] In some embodiments, when the amino acid residue at position Z¹⁶ is replaced with an amino acid residue that is different from the amino acid residue recited at said position, the amino acid residue at position Z¹⁶ is replaced with a polar amino acid residue.

[0481] In some embodiments, when the amino acid residue at position Z¹⁶ is replaced with an amino acid residue that is different from the amino acid residue recited at said position, the amino acid residue at position Z¹⁶ is replaced with a hydrophilic amino acid residue.

[0482] In some embodiments, when the amino acid residue at position Z¹⁶ is replaced with an amino acid residue that is different from the amino acid residue recited at said position, the amino acid residue at position Z¹⁶ is replaced with a non-polar amino acid residue.

[0483] In some embodiments, the amino acid residue at position Z¹⁶ is replaced with an amino acid residue that is different from the amino acid residue recited at said position.

[0484] In some embodiments, the amino acid residue(s) specified at a given position are substituted on the side chain with one or more groups selected from: —OH, —(C₁-C₄) alkyl, —O(C₁-C₄) alkyl, and —CN.

[0485] In some embodiments, R^{NT} is selected from the group consisting of: —C(O)-optionally substituted (C₁-C₁₅) alkyl and —C(O)-optionally substituted (C₁-C₃₅) heteroalkyl.

[0486] In some embodiments, R^{NT} is selected from the group consisting of: —C(O)-optionally substituted (C₁-C₁₀) alkyl and —C(O)-optionally substituted (C₁-C₃₅) heteroalkyl.

[0487] In some embodiments, R^{NT} is selected from the group consisting of: —C(O)-optionally substituted (C₁-C₈) alkyl and —C(O)-optionally substituted (C₁-C₃₀) heteroalkyl.

[0488] In some embodiments, R^{NT} is selected from the group consisting of: —C(O)-optionally substituted (C₁—C) alkyl and —C(O)-optionally substituted (C₁-C₃₀) heteroalkyl.

[0489] In some embodiments, R^{NT} is selected from the group consisting of: (d) gEPEG2PEG2CO, 4cpgCO, 5cpaCO, AcdPEG12CO, AcdPEG6CO, AcdPEG9CO, CEPEG2PEG2CO, C14gEPEG2PEG2CO, CF3CO, CF3propylamide, cPEG2gCO, cPEG3aCO, cPEG3gCO, cPEG5aCO, EtCO, F3CO, MeCO, mPEG3CO, mPEG6CO, cPEG3AmCO, DFNCO, DFNPEG2PEG2CO, IPBCO and IPBPEG2PEG2CO.

[0490] In some embodiments, R^{NT} is an —C(O)-optionally substituted (C₁-C₂₀) alkyl, for example, 4cpgCO, CF3CO, CF3propylamide, EtCO, F3CO, MeCO or 5cpaCO.

[0491] In some embodiments, R^{NT} is an —C(O)-optionally substituted (C₁-C₂₀) alkyl that comprises a quaternary amine, for example, 5cpaCO.

[0492] In some embodiments, R^{NT} is an —C(O)-optionally substituted (C₁-C₄₀) heteroalkyl, for example, AcdPEG12CO, AcdPEG6CO, AcdPEG9CO, C₁₂gEPEG2PEG2CO, cPEG2gCO, cPEG3gCO, mPEG3CO, mPEG6CO,
[0493] (d)gEPEG2PEG2CO, cPEG3aCO, and cPEG5aCO.

[0494] In some embodiments, R^{NT} is an —C(O)-optionally substituted (C₁-C₄₀) heteroalkyl that comprises a quaternary amine, for example, (d)gEPEG2PEG2CO, cPEG3aCO, cPEG5aCO.

[0495] In some embodiments, R^{NT} is an —C(O)-optionally substituted heteroalkyl that comprises a hydrophilic polymer, for example, polyethylene glycol (PEG).

[0496] In some embodiments, R^{NT} is an —C(O)-optionally substituted heteroalkyl that comprises the formula —[O—CH₂CH₂]n-, wherein n is an integer, for example wherein:
[0497] (i) n is an integer from about 1 to about 20;
[0498] (ii) n is an integer from about 1 to about 15;
[0499] (iii) n is an integer from about 1 to about 10; or
[0500] (iv) n is an integer from about 2 to about 12.

[0501] In some embodiments, when R^{NT} is a —C(O)-optionally substituted heteroalkyl, the —C(O)-optionally substituted heteroalkyl is unsubstituted or is substituted with one or more substituents independently selected from the group consisting of: —OH, —NH₂, —CO₂H, —CO₂CH₃, —NH(C═NH)NH₂, ═O (i.e., two geminal hydrogens on a carbon atom of the heteroalkyl are replaced with the group ═O),

[chemical structure]

or a quaternary amine as described herein, for example, —N⁺(CH₃)₃.

[0502] In some embodiments, when R^{NT} is a —C(O)-optionally substituted alkyl, the —C(O)-optionally substituted alkyl is unsubstituted or is substituted with one or more substituents independently selected from the group consisting of: Fluoro, —NH(C═NH)NH₂,

[chemical structure]

or a quaternary amine as described herein, for example, —N⁺(CH₃)₃.

[0503] In some embodiments:
[0504] (i) each R^{Y} and R^{Z} is independently selected from the group consisting of: hydrogen, optionally substituted (C₁-C₁₀) alkyl and optionally substituted (C₁-C₂₅) heteroalkyl, or
[0505] (ii) R^{Y} and R^{Z} come together with the N atom to which they are attached to form an optionally substituted (C₅₋₇) heterocyclic ring or an optionally substituted (C₇-C₉) bicyclic heterocyclic ring.

[0506] In some embodiments:
[0507] (i) each R^{Y} and R^{Z} is independently selected from the group consisting of: hydrogen, optionally substituted (C₁-C₈) alkyl and optionally substituted (C₁-C₂₀) heteroalkyl, or (ii) R^{Y} and R^{Z} come together with the N atom to which they are attached to form an optionally substituted (C) heterocyclic ring or an optionally substituted (C₈) bicyclic heterocyclic ring.

[0508] In some embodiments, R^{CT} is selected from the group consisting of: CONH2, CO(DiFPip), CO(Morph), CO(mPEG8), CO(NHPEG3a), CO(OAZBO), CO(TFMOHPip), CON(Me)2, CON(MePEG2), CON(mPEG2), CON(NMePip), CONH(PEG3a), CONH(PEG5a), CONHMe and CONMe2.

[0509] In some embodiments, R^{CT} is selected from the group consisting of: optionally substituted aminyl, optionally substituted piperidinyl, optionally substituted piperazinyl, optionally substituted morpholinyl and optionally substituted 3-oxa-8-azabicyclo[3.2.1]octanyl.

[0510] In some embodiments, R^{CT} is N(R^{Y})(R^{Z}), wherein R^{Y} is hydrogen and R^{Z} is an optionally substituted (C₁-C₃₀) heteroalkyl that comprises a quaternary amine, for example, CO(NHPEG3a), CONH(PEG3a) or CONH(PEG5a).

[0511] In some embodiments, when R^{Y} and/or R^{Z} is an optionally substituted alkyl, each optionally substituted alkyl is independently unsubstituted or is substituted with one or more substituents independently selected from the group consisting of: a quaternary amine as described herein, for example, —N⁺(CH₃)₃.

[0512] In some embodiments, when R^{Y} and/or R^{Z} is an optionally substituted heteroalkyl, each optionally substituted heteroalkyl is independently unsubstituted or is substituted with one or more substituents independently selected from the group consisting of: a quaternary amine as described herein, for example, —N⁺(CH₃)₃.

[0513] In some embodiments, when R^{Y} and R^{Z} come together with the N atom to which they are attached to form an optionally substituted heterocyclic ring, for example, optionally substituted aminyl, optionally substituted piperidinyl, optionally substituted piperazinyl and optionally substituted morpholinyl, the optionally substituted heterocyclic ring is unsubstituted or is substituted with one or more substituents independently selected from the group consisting of: Fluoro, —OH, —CF₃, (C₁-C₃) alkyl, or a quaternary amine as described herein, for example, —N⁺(CH₃)₃.

[0514] In some embodiments, when R^{Y} and R^{Z} come together with the N atom to which they are attached to form an optionally substituted bicyclic heterocyclic ring, for example, optionally substituted 3-oxa-8-azabicyclo[3.2.1]octanyl, the optionally substituted bicyclic heterocyclic ring is unsubstituted or is substituted with one or more substituents independently selected from the group consisting of: Fluoro, —OH, —CF₃, (C₁-C₃) alkyl, or a quaternary amine as described herein, for example, —N⁺(CH₃)₃.

[0515] In some embodiments, the cyclic peptide further comprises one or more natural or unnatural polymer(s) or a combination(s) thereof.

[0516] In some embodiments, the cyclic peptide further comprises a natural or unnatural polymer or a combination thereof.

[0517] In some embodiments, the cyclic peptide further comprises one or more natural or unnatural polymer or a combination thereof that is conjugated to R^{NT}, when present, and/or R^{CT}, when present, and/or the amino acid residues at positions Z³, Z⁵, Z⁶, Z⁷, Z⁸, Z¹⁰, Z¹¹, Z¹², Z¹³, Z¹⁴, Z¹⁵ and/or Z¹⁶, when an amino acid residue is present at the position.

[0518] In some embodiments, the cyclic peptide further comprises a natural or unnatural polymer or a combination thereof that is conjugated to R^{NT}, when present, or R^{CT}, when present, or the amino acid residues at positions Z³, Z⁵, Z⁶, Z⁷, Z⁸, Z¹⁰, Z¹¹, Z¹², Z¹³, Z¹⁴, Z¹⁵ or Z¹⁶, when an amino acid residue is present at the position.

[0519] The properties of the natural or unnatural polymer or a combination thereof can be optimized by modifying the length, conformation (e.g., branched or linear), and/or functionalization (e.g., adding a negatively charged group) of the natural or unnatural polymer or a combination thereof. For example, the natural or unnatural polymer or a combination thereof can be modified to increase solubility, avoid aggregation, and the like of the cyclic peptides of the present invention. For example, the natural or unnatural polymer or a combination thereof can be modified to increase the solubility and avoid aggregation of the cyclic peptides of the present invention by including hydrophilic or water-soluble polymers, including but not limited to PEG, charged PEG molecules, amino acids, or combinations thereof.

[0520] In an embodiment, the natural or unnatural polymer or a combination thereof is water-soluble, e.g., so that the cyclic peptides of the present invention do not precipitate out in an aqueous (e.g., physiological) environment. Further, the natural or unnatural polymer or a combination thereof is biocompatible, e.g., does not cause injury, toxicity or an immunological reaction in vivo.

[0521] A non-limiting example of a natural polymeric group is an amino acid sequence containing from about 10 to about 30 amino acids derived from (poly)peptides such as, natriuretic peptide precursor C, atrial natriuretic peptide, brain natriuretic peptide, serum albumin, IgG, histidine-rich glycoproteins, fibronectin, fibrinogen, zinc finger-containing polypeptides, osteocrin or fibroblast growth factor 2 (FGF2), or variants thereof with substitutions and/or deletions. A non-limiting example of an unnatural polymeric group (e.g. a synthetic polymer) is polyethylene glycol (PEG, also called polyethylene oxide (PEO)).

[0522] In an embodiment, the natural polymer or unnatural polymer comprises residues selected from amino acids or carbohydrates or combinations, thereof. In an embodiment, the natural or unnatural polymer or a combination thereof comprises an amino acid sequence. In an embodiment, the natural or unnatural polymer or a combination thereof comprises about 10 to about 30 amino acid residues. In an embodiment, the natural or unnatural polymer or a combination thereof comprises about 10 to about 25 amino acid residues. In an embodiment, the natural or unnatural polymer or a combination thereof comprises about 15 to about 20 amino acid residues.

[0523] In an embodiment, the natural or unnatural polymer or a combination thereof is a combination of a natural polymer and an unnatural polymer, for example a combination of an amino acid sequence and a hydrophilic polymer, such as polyethylene glycol (PEG).

[0524] In an embodiment, the natural or unnatural polymer or a combination thereof comprises optionally substituted heteroalkylene. In an embodiment, the natural or unnatural polymer or a combination thereof is optionally substituted heteroalkylene.

[0525] In an embodiment, the natural or unnatural polymer or a combination thereof comprises optionally substituted (C₁₀-C₂₀₀) heteroalkylene. In an embodiment, the natural or unnatural polymer or a combination thereof is optionally substituted (C₁₀-C₂₀₀) heteroalkylene. In an embodiment, the natural or unnatural polymer or a combination thereof comprises optionally substituted (C₁₀-C₁₅₀) heteroalkylene. In an embodiment, the natural or unnatural polymer or a combination thereof is optionally substituted (C₁₀-C₁₅₀) heteroalkylene. In an embodiment, the natural or unnatural polymer or a combination thereof comprises optionally substituted (C₁₀-C₁₀₀) heteroalkylene. In an embodiment, the natural or unnatural polymer or a combination thereof is optionally substituted (C₁₀-C₁₀₀) heteroalkylene. In an embodiment, the natural or unnatural polymer or a combination thereof comprises optionally substituted (C₁₀-C₉₀) heteroalkylene. In an embodiment, the natural or unnatural polymer or a combination thereof is optionally substituted (C₁₀-C₉₀) heteroalkylene.

[0526] In an embodiment, the natural or unnatural polymer or a combination thereof comprises optionally substituted (C₁₀-C₈₀) heteroalkylene. In an embodiment, the natural or unnatural polymer or a combination thereof is optionally substituted (C₁₀-C₈₀) heteroalkylene. In an embodiment, the natural or unnatural polymer or a combination thereof comprises optionally substituted (C₁₀-C₇₀) heteroalkylene. In an embodiment, the natural or unnatural polymer or a combination thereof is optionally substituted (C₁₀-C₇₀) heteroalkylene. In an embodiment, the natural or unnatural polymer or a combination thereof comprises optionally substituted (C₁₀-C₆₀) heteroalkylene. In an embodiment, the natural or unnatural polymer or a combination thereof is optionally substituted (C₁₀-C₆0) heteroalkylene. In an embodiment, the natural or unnatural polymer or a combination thereof comprises about 1 to about 7 heteroatoms, independently selected from the group consisting of N, O, S, and P, for every 10 carbons in the optionally substituted heteroalkylene. In an embodiment, the natural or unnatural polymer or a combination thereof comprises about 1 to about 5 heteroatoms, independently selected from the group consisting of N, O, S, and P, for every 10 carbons in the optionally substituted heteroalkylene. In an embodiment, the heteroatoms are independently selected from the group consisting of N, O or S. In an embodiment, the heteroatoms are independently selected from the group consisting of N or O.

[0527] In an embodiment, the natural or unnatural polymer or a combination thereof is a combination of naturally occurring monomer units and synthetic monomer units, for example a combination of amino acid monomer units and PEG monomer units.

[0528] In an embodiment, the natural or unnatural polymer or a combination thereof comprises a hydrophilic polymer. In an embodiment, the natural or unnatural polymer or a combination thereof is a hydrophilic polymer. In an embodiment, the hydrophilic polymer can be branched or unbranched. In an embodiment, the hydrophilic polymer is not branched. The present invention contemplates the use of hydrophilic or water soluble polymers (e.g., PEG) that can vary in type (e.g., homopolymer or copolymer; random, alternating or block copolymer; linear or branched), linkage (e.g., hydrolysable or stable linkage such as, e.g., amide, imine, aminal, alkylene, or ester bond), and length (e.g., from about 0.2, 0.4 or 0.6 kDa to about 2, 3, 4 or 5 kDa, such as about 0.2 kDa to about 5 kDa). Non-limiting examples of hydrophilic polymers that can be used in the present invention include polymers formed from carboxylic acid-bearing monomers (e.g., methacrylic acid (MA) and acrylic acid (AA)), polyvinyl alcohols, polymers formed from hydroxyl-bearing monomers (e.g., hydroxyethyl methacrylate (HEMA), hydroxypropyl methacrylate (HPMA), hydroxypropyl methacrylamide, and 3-trimethylsilylpropyl methacrylate (TMSPMA)), polyalkylene oxides, polyoxyethylated polyols (e.g., glycerol), poly(ethylene glycol) (PEG), poly(propylene glycol), mono-C₁-C₁₀ alkoxy-PEGs (e.g., monomethoxy-PEG), tresyl monomethoxy-PEG, aryloxy-PEGs, PEG acrylate (PEGA), PEG methacrylate, PEG propionaldehyde, bis-succinimidyl carbonate PEG, copolymers of 2-methacryloyloxyethyl-phosphorylcholine (MPC) and N-vinyl pyrrolidone (VP), hydroxy functional poly(N-vinyl pyrrolidone) (PVP), SIS-PEG (SIS is polystyrene-polyisobutylene-polystyrene block copolymer), polystyrene-PEG, polyisobutylene-PEG, PCL-PEG (PCL is polycaprolactone), PLA-PEG (PLA is polylactic acid), PMMA-PEG (PMMA is poly(methyl methacrylate)), PDMS-PEG (PDMS is polydimethyloxanone), PVDF-PEG (PVDF is polyvinylidene fluoride), PLURONIC™ surfactants (polypropylene oxide-co-polyethylene glycol), poly(tetramethylene glycol), poly(L-lysine-g-ethylene glycol) (PLL-g-PEG), poly(L-lysine-g-hyaluronic acid) (PLL-gHA), poly(L-lysine-g-phosphoryl choline) (PLL-g-PC), poly(L-lysine-g-vinyl pyrrolidone) (PLL-g-PVP), poly(ethylimine-g-ethylene glycol) (PEI-g-PEG), poly(ethylimine-g-hyaluronic acid) (PEI-g-HA), poly(ethylimine-g-phosphoryl choline) (PEI-g-PC), poly(ethylimine-g-vinyl pyrrolidone) (PEI-g-PVP), PLL-co-HA, PLL-co-PC, PLL-co-PVP, PEI-co-PEG, PEI-co-HA, PEI-co-PC, PEI-co-PVP, cellulose and derivatives thereof (e.g., hydroxyethyl cellulose), dextran, dextrins, hyaluronic acid and derivatives thereof (e.g., sodium hyaluronate), elastin, chitosan, acrylic sulfate, acrylic sulfonate, acrylic sulfamate, methacrylic sulfate, methacrylic sulfonate, methacrylic sulfamate, polymers and copolymers thereof, and polymers and copolymers of combinations thereof.

[0529] In an embodiment, the natural or unnatural polymer or a combination thereof comprises one or more aromatic compound(s), such as dihydroxybenzoic acid (e.g. 3,5-dihydroxybenzoic acid), biphenol (e.g. 4,4′-biphenol) or 4-hydroxybenzyl alcohol, wherein each of the one or more aromatic compound(s) connect(s) two hydrophilic polymers, such as PEG.

[0530] In an embodiment, the hydrophilic polymer comprises polyethylene glycol (PEG). In an embodiment, the hydrophilic polymer is PEG. In an embodiment, the hydrophilic polymer comprises PEG18. In an embodiment, the hydrophilic polymer is PEG18. In an embodiment, the hydrophilic polymer comprises PEG21. In an embodiment, the hydrophilic polymer is PEG21. In general, a “PEGn” polymer associated with the number n, comprises the formula: —[O—CH₂CH₂]n-, where n is the number of ethylene oxide units. In an embodiment, the natural or unnatural polymer or a combination thereof comprises the formula: —[O—CH₂CH₂]n-, wherein n is an integer. In an embodiment, n is an integer from about 6 to about 100. In an embodiment, n is an integer from about 6 to about 100, and the PEG polymer is from about 0.3 kDa to about 5 kDa. In another embodiment, n is an integer from about 12 to about 50. In another embodiment, n is an integer from about 12 to about 50, and the PEG polymer is from about 0.6 kDa to about 2.5 kDa. In yet another embodiment, n is an integer from about 12 to about 24. In yet another embodiment, n is an integer from about 12 to about 24, and the PEG polymer is from about 0.6 kDa to about 1.2 kDa.

[0531] In an embodiment, the natural or unnatural polymer or a combination thereof is at least about 0.4, 0.6, 0.8, 1, 1.2, 1.4, 1.6 or 1.8 kDa, or up to about 2, 2.2, 2.4, 2.6, 2.8, 3, 3.2, 3.4, 3.6, 3.8, 4, 4.2, 4.4, 4.6, 4.8 or 5 kDa. In an additional embodiment, the natural or unnatural polymer or a combination thereof is in the range from about 0.4 kDa to about 2.5 kDa or from about 0.6 kDa to about 1.5 kDa. In an embodiment, the natural or unnatural polymer or a combination thereof is at least about 0.2 kDa. In an embodiment, the natural or unnatural polymer or a combination thereof is at least about 0.4 kDa. In an embodiment, the natural or unnatural polymer or a combination thereof is at least about 0.6 kDa. In an embodiment, the natural or unnatural polymer or a combination thereof is less than about 2 kDa. In an embodiment, the natural or unnatural polymer or a combination thereof is less than about 3 kDa. In an embodiment, the natural or unnatural polymer or a combination thereof is less than about 4 kDa. In an embodiment, the natural or unnatural polymer or a combination thereof is less than about 5 kDa. In an embodiment, the natural or unnatural polymer or a combination thereof is about 0.2 kDa to about 5 kDa. In an embodiment, the natural or unnatural polymer or a combination thereof is about 0.4 kDa to about 5 kDa. In an embodiment, the natural or unnatural polymer or a combination thereof is about 0.6 kDa to about 5 kDa. In an embodiment, the natural or unnatural polymer or a combination thereof is about 0.2 kDa to about 2 kDa. In an embodiment, the natural or unnatural polymer or a combination thereof is about 0.2 kDa to about 3 kDa. In an embodiment, the natural or unnatural polymer or a combination thereof is about 0.2 kDa to about 4 kDa. In an embodiment, the natural or unnatural polymer or a combination thereof is about 0.4 kDa to about 2 kDa. In an embodiment, the natural or unnatural polymer or a combination thereof is about 0.4 kDa to about 3 kDa. In an embodiment, the natural or unnatural polymer or a combination thereof is about 0.4 kDa to about 4 kDa. In an embodiment, the natural or unnatural polymer or a combination thereof is about 0.6 kDa to about 2 kDa. In an embodiment, the natural or unnatural polymer or a combination thereof is about 0.6 kDa to about 3 kDa. In an embodiment, the natural or unnatural polymer or a combination thereof is about 0.6 kDa to about 4 kDa. In an embodiment, the size of the natural or unnatural polymer or a combination thereof in kDa can be determined using mass spectrometry. In an embodiment, the size of the natural or unnatural polymer or a combination thereof in kDa is determined using mass spectrometry.

[0532] In an embodiment, the natural or unnatural polymer or a combination thereof (for example, a hydrophilic or water-soluble polymer (e.g., PEG)) is functionalized with one or more functional groups that impart a negative charge to the natural or unnatural polymer or a combination thereof under physiological conditions, such as, e.g, carboxyl, sulfate or phosphate groups, or a combination thereof. In an embodiment, the natural or unnatural polymer or a combination thereof (for example, a hydrophilic or water-soluble polymer (e.g., PEG)) is functionalized with one or more functional groups that impart a positive charge to the polymer under physiological conditions, such as, an amine, or a tertiary amine.

[0533] In an embodiment, the natural or unnatural polymer or a combination thereof comprises one or more cleavable groups, such as disulfide, ester and/or carbonate.

[0534] In some embodiments, the cyclic peptide is an inhibitor of an interleukin-23 (IL-23) receptor.

[0535] In some embodiments, the cyclic peptide inhibits the binding of an interleukin-23 (IL-23) to an IL-23 receptor.

[0536] In some embodiments, the cyclic peptide inhibits an interleukin-23 (IL-23) receptor to reduce or prevent the activation of the Jak-Stat signaling molecules, Jak2, Tyk2, Stat1, Stat 3, Stat 4, and/or Stat 5.

[0537] In some embodiments, the cyclic peptide inhibits an interleukin-23 (IL-23) receptor to reduce or prevent the phosphorylation of Stat 3.

[0538] In some embodiments, the cyclic peptide inhibits an interleukin-23 (IL-23) receptor in a reporter assay with an IC₅₀ value less than about 6.3 μM. In some embodiments, the cyclic peptide inhibits an interleukin-23 (IL-23) receptor in a reporter assay with an IC₅₀ value less than about 2 μM. In some embodiments, the cyclic peptide inhibits an interleukin-23 (IL-23) receptor in a reporter assay with an IC₅₀ value less than about 1 μM. In some embodiments, the cyclic peptide inhibits an interleukin-23 (IL-23) receptor in a reporter assay with an IC₅₀ value less than about 0.5 μM. In some embodiments, the cyclic peptide inhibits an interleukin-23 (IL-23) receptor in a reporter assay with an IC₅₀ value less than about 0.25 μM. In some embodiments, the cyclic peptide inhibits an interleukin-23 (IL-23) receptor in a reporter assay with an IC₅₀ value less than about 0.1 μM. In some embodiments, the cyclic peptide inhibits an interleukin-23 (IL-23) receptor in a reporter assay with an IC₅₀value less than about 0.05 μM. In some embodiments, the cyclic peptide inhibits an interleukin-23 (IL-23) receptor in a reporter assay with an IC₅₀ value less than about 0.025 μM. In some embodiments, the cyclic peptide inhibits an interleukin-23 (IL-23) receptor in a reporter assay with an IC₅₀ value less than about 0.01 μM. In some embodiments, the cyclic peptide inhibits an interleukin-23 (IL-23) receptor in an IL-23 reporter assay with an IC₅₀ value less than about 0.005 μM. In some embodiments, the cyclic peptide inhibits an interleukin-23 (IL-23) receptor in a reporter assay with an IC₅₀ value less than about 0.0025 μM.

[0539] In some embodiments, the IL-23 reporter assay is as described in the description In some embodiments, the cyclic peptide inhibits an interleukin-23 (IL-23) receptor in a peripheral blood mononuclear cell (PBMC) pSTAT3 assay with an IC₅₀ value less than about 0.05 nM. In some embodiments, the cyclic peptide inhibits an interleukin-23 (IL-23) receptor in a peripheral blood mononuclear cell (PBMC) pSTAT3 assay with an IC₅₀ value less than about 0.04 nM. In some embodiments, the cyclic peptide inhibits an interleukin-23 (IL-23) receptor in a peripheral blood mononuclear cell (PBMC) pSTAT3 assay with an IC₅₀ value less than about 0.03 nM.

[0540] In some embodiments, the cyclic peptide inhibits an interleukin-23 (IL-23) receptor in a peripheral blood mononuclear cell (PBMC) pSTAT3 assay with an IC₅₀ value less than about 0.02 nM In some embodiments, the cyclic peptide inhibits an interleukin-23 (IL-23) receptor in a peripheral blood mononuclear cell (PBMC) pSTAT3 assay with an IC₅₀ value less than about 0.01 nM. In some embodiments, the peripheral blood mononuclear cell (PBMC) pSTAT3 assay is as described in the description.

[0541] In some embodiments, the cyclic peptide exhibits an Exposed Polar Surface Area (EPSA) of less than about 275 Å² in an EPSA assay. In some embodiments, the cyclic peptide exhibits an Exposed Polar Surface Area (EPSA) of less than about 250 Å² in an EPSA assay. In some embodiments, the cyclic peptide exhibits an Exposed Polar Surface Area (EPSA) of less than about 225 Å² in an EPSA assay. In some embodiments, the cyclic peptide exhibits an Exposed Polar Surface Area (EPSA) of less than about 200 Å² in an EPSA assay. In some embodiments, the cyclic peptide exhibits an Exposed Polar Surface JaneArea (EPSA) of less than about 175 Å² in an EPSA assay. In some embodiments, the cyclic peptide exhibits an Exposed Polar Surface Area (EPSA) of less than about 150 Å² in an EPSA assay. In some embodiments, the cyclic peptide exhibits an Exposed Polar Surface Area (EPSA) of less than about 145 Å² in an EPSA assay. In some embodiments, the cyclic peptide exhibits an Exposed Polar Surface Area (EPSA) of less than about 140 Å² in an EPSA assay. In some embodiments, the Exposed Polar Surface Area (EPSA) assay is as described in the description.

[0542] In another general aspect, the invention relates to a compound or compounds selected from any one of the tables 1A, 1B, 1C, 1D, lE and 1 For pharmaceutically acceptable salts thereof or solvates thereof. In some embodiments, the cyclic peptide has the following structure or pharmaceutically acceptable salts thereof or solvates thereof:

[0543] In another general aspect, the invention relates to a pharmaceutical composition comprising the cyclic peptide or pharmaceutically acceptable salt thereof or solvate thereof as described herein, and a pharmaceutically acceptable carrier, excipient, or diluent.

[0544] In some embodiments, the pharmaceutical composition further comprises an enteric coating.

[0545] In some embodiments, the enteric coating protects and releases the pharmaceutical composition within a subject's lower gastrointestinal system.

[0546] In another general aspect, the invention relates to a method for treating an Inflammatory Bowel Disease (IBD), ulcerative colitis, Crohn's disease, Celiac disease (nontropical Sprue), enteropathy associated with seronegative arthropathies, microscopic colitis, collagenous colitis, eosinophilic gastroenteritis, colitis associated with radio- or chemo-therapy, colitis associated with disorders of innate immunity as in leukocyte adhesion deficiency-1, chronic granulomatous disease, glycogen storage disease type ib, Hermansky-Pudlak syndrome, Chediak-Higashi syndrome, and Wiskott-Aldrich Syndrome, pouchitis resulting after proctocolectomy and ileoanal anastomosis, gastrointestinal cancer, pancreatitis, insulin-dependent diabetes mellitus, mastitis, cholecystitis, cholangitis, pericholangitis, chronic bronchitis, chronic sinusitis, asthma, psoriasis, psoriatic arthritis, or graft versus host disease in a subject, comprising providing to the subject an effective amount of the cyclic peptide or pharmaceutically acceptable salt thereof or solvate thereof as described herein, or the pharmaceutical composition as described herein.

[0547] In some embodiments of the method described herein, the cyclic peptide or pharmaceutically acceptable salt thereof or solvate thereof or the pharmaceutical composition is provided to the subject by an oral, parenteral, intravenous, peritoneal, intradermal, subcutaneous, intramuscular, intrathecal, inhalation, vaporization, nebulization, sublingual, buccal, parenteral, rectal, intraocular, inhalation, topically, vaginal, or topical route of administration.

[0548] In some embodiments of the method described herein for treating Inflammatory Bowel Disease (IBD), ulcerative colitis, or Crohn's disease, the cyclic peptide or pharmaceutically acceptable salt thereof or solvate thereof or the pharmaceutical composition is provided to the subject orally.

[0549] In some embodiments of the method described herein for treating psoriasis, the cyclic peptide or pharmaceutically acceptable salt thereof or solvate thereof or the pharmaceutical composition is provided to the subject orally, topically, parenterally, intravenously, subcutaneously, peritonealy, or intravenously.

[0550] In some embodiments, the cyclic peptide described herein, or the pharmaceutical composition described herein for use in the treatment of an Inflammatory Bowel Disease (IBD), ulcerative colitis, Crohn's disease, Celiac disease (nontropical Sprue), enteropathy associated with seronegative arthropathies, microscopic colitis, collagenous colitis, eosinophilic gastroenteritis, colitis associated with radio- or chemo-therapy, colitis associated with disorders of innate immunity as in leukocyte adhesion deficiency-1, chronic granulomatous disease, glycogen storage disease type 1b, Hermansky-Pudlak syndrome, Chediak-Higashi syndrome, and Wiskott-Aldrich Syndrome, pouchitis resulting after proctocolectomy and ileoanal anastomosis, gastrointestinal cancer, pancreatitis, insulin-dependent diabetes mellitus, mastitis, cholecystitis, cholangitis, pericholangitis, chronic bronchitis, chronic sinusitis, asthma, psoriasis, psoriatic arthritis, or graft versus host disease in a subject, comprising providing to the subject an effective amount of the cyclic peptide or pharmaceutically acceptable salt thereof or solvate thereof as described herein, or the pharmaceutical composition as described herein.

[0551] In some embodiments, the cyclic peptide or pharmaceutically acceptable salt thereof or solvate thereof or the pharmaceutical composition is provided to the subject by an oral, parenteral, intravenous, peritoneal, intradermal, subcutaneous, intramuscular, intrathecal, inhalation, vaporization, nebulization, sublingual, buccal, parenteral, rectal, intraocular, inhalation, topically, vaginal, or topical route of administration.

[0552] In some embodiments, when the cyclic peptide for use or the pharmaceutical composition for use as described herein is used in the treatment of Inflammatory Bowel Disease (IBD), ulcerative colitis, or Crohn's disease, the cyclic peptide or pharmaceutically acceptable salt thereof or solvate thereof or the pharmaceutical composition is provided to the subject orally.

[0553] In some embodiments, when the cyclic peptide or the pharmaceutical composition for use as described herein is used in the treatment of psoriasis, the cyclic peptide or pharmaceutically acceptable salt thereof or solvate thereof or the pharmaceutical composition is provided to the subject orally, topically, parenterally, intravenously, subcutaneously, peritonealy, or intravenously.

[0554] In some embodiments, the cyclic peptide, or the pharmaceutical composition as described herein is for use as a medicament.

[0555] In some embodiments, the use of the cyclic peptide or the pharmaceutical composition as described herein is for the manufacture of a medicament for treating a disease.

[0556] In some embodiments, the use of the cyclic peptide or the pharmaceutical composition as described herein is for the manufacture of a medicament for treating a disease disclosed herein.

### Particular Cyclic Peptides of the Present Invention

[0557] In particular, the present invention relates to a cyclic peptide, or a pharmaceutically acceptable salt or solvate thereof, comprising an amino acid sequence of Formula (A).

(A)
Z³-Z⁴-Z⁵-Z⁶-Z⁷-Z⁸-Z⁹-Z¹⁰-Z¹¹-Z¹²-Z¹³-Z¹⁴-Z¹⁵-Z¹⁶,

wherein:
[0558] the amino acid residue at position Z³ is absent or the residue of r;
[0559] the amino acid residue at position Z⁴ is the residue of an amino acid that is connected to the amino acid residue at position Z⁹;
[0560] the amino acid residue at position Z⁵ is the residue of N(N(Me)₂);
[0561] the amino acid residue at position Z⁶ is the residue of T;
[0562] the amino acid residue at position Z⁷ is the residue of 7MeW;
[0563] the amino acid residue at position Z⁸ is the residue of K(NMeAc);
[0564] the amino acid residue at position Z⁹ is the residue of an amino acid that is connected to the amino acid residue at position Z⁴;
[0565] the amino acid residue at position Z¹⁰ is the residue of TMAPF;
[0566] the amino acid residue at position Z¹¹ is the residue of 2Nal;
[0567] the amino acid residue at position Z¹² is absent or the residue of THP;
[0568] the amino acid residue at position Z¹³ is the residue of K(NMeAc);
[0569] the amino acid residue at position Z¹⁴ is the residue of N;
[0570] the amino acid residue at position Z¹⁵ is absent or the residue of 3Pya;
[0571] the amino acid residue at position Z¹⁶ is absent or the residue of Sar;
[0572] eight or fewer of the amino acid residues at positions Z³, Z⁵, Z⁶, Z⁷, Z⁸, Z°, Z¹¹, Z¹², Z¹³, Z¹⁴, Z¹⁵ and Z¹⁶, when an amino acid residue is present at the position, are independently replaced with an amino acid residue that is different from the amino acid residue recited at said position;
[0573] wherein when the amino acid residue at position Z³ is replaced with an amino acid residue that is different from the amino acid residue recited at said position, the amino acid residue at position Z³ is replaced with an amino acid residue selected from the group consisting of: APEG2ser, APEG2Ser, APEG2Ser(S*), e(c), e(C), hk(Me)₃, k(5cpa), k(cPEG3a), k(d), k(D), k(dPEG12Ac), k(dPEG6Ac), k(dPEG9Ac), k(Me)₃, K(Me)₃, k(PEG2PEG2gEC12), k(PEG2PEG2gEC14), k(PEG2PEG2PEG2PEG2gEC12), k(PEG2PEG6gEC12), SP6, APEG2Ser(RS), gPEG2Ser and k(PEG2PEG2gE(c)C12;
[0574] wherein when the amino acid residue at position Z⁵ is replaced with an amino acid residue that is different from the amino acid residue recited at said position, the amino acid residue at position Z⁵ is replaced with an amino acid residue selected from the group consisting of: A, APEG2Ser(S*), Dab(Me)₃, F, Gab, K(cPEG3a), K(Me)₃, K(PEG2PEG2gEC12), K(PEG2PEG2gEC14), L, N, N(N(Me)), N(NMe), Q and W;
[0575] wherein when the amino acid residue at position Z⁶ is replaced with an amino acid residue that is different from the amino acid residue recited at said position, the amino acid residue at position Z⁶ is replaced with an amino acid residue selected from the group consisting of: A and L;
[0576] wherein when the amino acid residue at position Z⁷ is replaced with an amino acid residue that is different from the amino acid residue recited at said position, the amino acid residue at position Z⁷ is replaced with an amino acid residue selected from the group consisting of: W, 7(3NAcPh)W, 7CF3W, NMe7MeW, 2Nal, A, F and L;
[0577] wherein when the amino acid residue at position Z⁸ is replaced with an amino acid residue that is different from the amino acid residue recited at said position, the amino acid residue at position Z⁸ is replaced with an amino acid residue selected from the group consisting of: K(NMeAC), Q, 4AmPhe, A, AIB, APEG2Ser, APEG2Ser(R*), APEG2Ser(S*), Cit, Dab(NMeAc), Dab(NMecarn), Dab(NMeCarn), Dab(NMeCOmPEG6), Dab(NMecPEG2a), Dab(NMecPEG3a), Dab(NMecPEG5a), Dap(NMeAc), F, K(4cpg), K(Ac), K(cPEG3a), K(Me)₃, K(NMeCOmPEG6), K(NMePEG3a), K(NmPEG6Ac), K(PEG2PEG2gEC12), K(PEG2PEG2gEC14), L, Paf(Ac), Q(N(Me)2), Q(NHtBu), W, Y and K(cPEG3aCO);
[0578] wherein when the amino acid residue at position Z¹⁰ is replaced with an amino acid residue that is different from the amino acid residue recited at said position, the amino acid residue at position Z¹⁰ is replaced with an amino acid residue selected from the group consisting of: AEF, 4DMPEF, 4DMPzEF, 4TMABYF, ACHMF, AEF((Ch)cPEG3a), AEF(Ac), AEF(AcCh), AEF(aPEG2a), AEF(BisMEP), AEF(BisMEPa), AEF(BisPEG2a)(RS), AEF(BisPEG2a)(S*), AEF(G), AEF(Me)2, AEF(MEP), AEF(MePrpa), AEF(N(Me)2), AEF(NHCh), AEF(NHcPEG3a), AEF(NMe), AEF(NMe2mPEG3), AEF(NMe3), AEF(NMeBismPEG3), AEF(NMePEG2a), AEF(NmPEG6), AEF(NsCh), AEF(PEG2a), AEF(SPD), APEG2F, APEG3F, dFPPEG3F, Diazabiclyclooctane6F, DMMMF, DMPMF, DMTASF, F(4G), F(4N3), F(4TzlDMA4mPEG), F(4TzlMME), F(4TzlMMol), F(4TzlMMo3), F(4TzlMMo4), F(4TzlTMA1), F(4TzlTMA2), F(4TzlTMA3), F(4TzlTMA4), F(4TzlTMA5), GPEG3F, hFTMAPF, MMoEF, MMoPF, MMPEG3F, morfTMA4F, mPEG2TMA2F, mPEG2TMA4F, mPEG3TMA4F, MPzPEG3F, MTASF, NPyEF, NPyPEG3F, PiperazinequatF, TBAPEG3F, TMA3F, TMA4F, TMA6F, TMA8F, Tzl(Ch), TzlChmPEG, TzlChmPEG3, Y(C₉₀H), Y(OEOXIMECh), Y(OTzlCh), Y(OTzlChC16), Y(OTzlChC8), Y(OTzlC1aC8), Y(OTzlChmPEG), Y(OTzlChmPEG3), Y(OTzlPEG3a), Y(OTzlPEG4a), Y(OTzlTMA4), Y(OZOXIMECh), YC8CO(NHPEG3a), YC8COPip, YCF2H, ACHMF(R*, S*), ACHMF(S*, S*), AEF(cPEG3a), APF, F(4TzlAme2), F(4TzlG2), F(4TzlMMo7) and F(4TzlTMA7);
[0579] wherein when the amino acid residue at position Z¹¹ is replaced with an amino acid residue that is different from the amino acid residue recited at said position, the amino acid residue at position Z¹¹ is replaced with an amino acid residue selected from the group consisting of: A, F, L and W;
[0580] wherein when the amino acid residue at position Z¹² is replaced with an amino acid residue that is different from the amino acid residue recited at said position, the amino acid residue at position Z¹² is replaced with an amino acid residue selected from the group consisting of: A, Achx, Achx(diF), Acpx, Aib, AIB, aMeK, aMeL, Chg, diFCpx, F, L, Pip(NMe), Pip(NMe2), W and diFAchx;
[0581] wherein when the amino acid residue at position Z¹³ is replaced with an amino acid residue that is different from the amino acid residue recited at said position, the amino acid residue at position Z¹³ is replaced with an amino acid residue selected from the group consisting of: K(NMeAC), E, A, AIB, aMeE, APEG2Ser, APEG2Ser(S*), Cit, Dab(NMeAc), Dab(NMecarn), Dab(NMeCOmPEG6), Dab(NMecPEG2a), Dab(NMecPEG3a), Dap(Ac), Dap(NMeAc), E(c), E(C), F, K(5cpa), K(Ac), K(cPEG3a), K(d), K(D), K(dPEG12Ac), K(dPEG6Ac), K(dPEG9Ac), K(Me)₃, K(NMeCOmPEG6), K(NMeCOPEG4N+Me3), K(NMePEG3a), K(NmPEG6Ac), K(PEG2PEG2gEC12), K(PEG2PEG2gEC14), K(PEG2PEG2PEG2gEC12), L, Q(N(Me)2), Tetrazole, Tetrazole(NMe), W, K(DFN), K(IPB) and Nle;
[0582] wherein when the amino acid residue at position Z¹⁴ is replaced with an amino acid residue that is different from the amino acid residue recited at said position, the amino acid residue at position Z¹⁴ is replaced with an amino acid residue selected from the group consisting of: K(Ac) and N(NMe);
[0583] wherein when the amino acid residue at position Z¹⁵ is replaced with an amino acid residue that is different from the amino acid residue recited at said position, the amino acid residue at position Z¹⁵ is replaced with an amino acid residue selected from the group consisting of: 3pya, 5CF33Pya, 5MePyridinAla, bAla, dK, dL, F, f, H, h, k, N, NMe3Pya, NMebAla, NMeDTyr, orn, Paf, s, t, THP, v, y and A;
[0584] wherein when the amino acid residue at position Z¹⁶ is replaced with an amino acid residue that is different from the amino acid residue recited at said position, the amino acid residue at position Z¹⁶ is replaced with an amino acid residue selected from the group consisting of: 4diFPro, NMeDTyr, NMeK(PEG2PEG2C12), NMeK(PEG2PEG2C14), NMeK(PEG2PEG2gEC12), NMeK(PEG2PEG2gEC14), NMeK(PEG2PEG2K(PEG2PEG2gEC12)₂), NMeK(PEG2PEG2K(PEG2PEG2PEG2PEG2gEC12)₂), NMeK(PEG2PEG2PEG2gEC12), NMeK(PEG2PEG2PEG2PEG2gEC12), NMeK(PEG2PEG6gEC12), NMeK(PEG2PEG6gEC14), NMeK(SP6PEG2PEG2C12) and NMeK(SP6PEG2PEG2gEC12); and at least one of the amino acid residues at positions Z³, Z⁵, Z⁶, Z⁷, Z⁸, Z¹⁰, Z¹¹, Z¹², Z¹³, Z¹⁴, Z¹⁵ and/or Z¹⁶, when an amino acid residue is present at the position, each independently comprise(s) at least one quaternary amine.

[0585] In particular, the present invention relates to a cyclic peptide, or a pharmaceutically acceptable salt or solvate thereof, comprising an amino acid sequence of Formula (B):

(B)
Z³-Z⁴-Z⁵-Z⁶-Z⁷-Z⁸-Z⁹-Z¹⁰-Z¹¹-Z¹²-Z¹³-Z¹⁴-Z¹⁵-Z¹⁶,

wherein:
[0586] the amino acid residue at position Z³ is absent or the residue of r;
[0587] the amino acid residue at position Z⁴ is the residue of an amino acid that is connected to the amino acid residue at position Z⁹;
[0588] the amino acid residue at position Z⁵ is the residue of N(N(Me)₂);
[0589] the amino acid residue at position Z⁶ is the residue of T;
[0590] the amino acid residue at position Z⁷ is the residue of 7MeW;
[0591] the amino acid residue at position Z⁸ is the residue of K(NMeAc);
[0592] the amino acid residue at position Z⁹ is the residue of an amino acid that is connected to the amino acid residue at position Z⁴;
[0593] the amino acid residue at position Z¹⁰ is the residue of TMAPF;
[0594] the amino acid residue at position Z¹¹ is the residue of 2Nal;
[0595] the amino acid residue at position Z¹² is absent or the residue of THP;
[0596] the amino acid residue at position Z¹³ is the residue of K(NMeAc);
[0597] the amino acid residue at position Z¹⁴ is the residue of N;
[0598] the amino acid residue at position Z¹⁵ is absent or the residue of 3Pya;
[0599] the amino acid residue at position Z¹⁶ is absent or the residue of Sar;
[0600] eight or fewer of the amino acid residues at positions Z³, Z⁵, Z⁶, Z⁷, Z⁸, Z¹⁰, Z¹¹, Z¹², Z¹³, Z¹⁴, Z¹⁵ and Z¹⁶, when an amino acid residue is present at the position, are independently replaced with an amino acid residue that is different from the amino acid residue recited at said position;
[0601] wherein when the amino acid residue at position Z³ is replaced with an amino acid residue that is different from the amino acid residue recited at said position, the amino acid residue at position Z³ is replaced with an amino acid residue selected from the group consisting of: APEG2ser, APEG2Ser, APEG2Ser(S*), e(c), e(C), hk(Me)₃, k(5cpa), k(cPEG3a), k(d), k(D), k(dPEG12Ac), k(dPEG6Ac), k(dPEG9Ac), k(Me)₃, K(Me)₃, k(PEG2PEG2gEC12), k(PEG2PEG2gEC14), k(PEG2PEG2PEG2PEG2gEC12), k(PEG2PEG6gEC12), SP6, APEG2Ser(RS), gPEG2Ser and k(PEG2PEG2gE(c)C12;
[0602] wherein when the amino acid residue at position Z⁵ is replaced with an amino acid residue that is different from the amino acid residue recited at said position, the amino acid residue at position Z⁵ is replaced with an amino acid residue selected from the group consisting of: A, APEG2Ser(S*), Dab(Me)₃, F, Gab, K(cPEG3a), K(Me)₃, K(PEG2PEG2gEC12), K(PEG2PEG2gEC14), L, N, N(N(Me)), N(NMe), Q and W;
[0603] wherein when the amino acid residue at position Z⁶ is replaced with an amino acid residue that is different from the amino acid residue recited at said position, the amino acid residue at position Z⁶ is replaced with an amino acid residue selected from the group consisting of: A and L;
[0604] wherein when the amino acid residue at position Z⁷ is replaced with an amino acid residue that is different from the amino acid residue recited at said position, the amino acid residue at position Z⁷ is replaced with an amino acid residue selected from the group consisting of: W, 7(3NAcPh)W, 7CF3W, NMe7MeW, 2Nal, A, F and L;
[0605] wherein when the amino acid residue at position Z⁸ is replaced with an amino acid residue that is different from the amino acid residue recited at said position, the amino acid residue at position Z⁸ is replaced with an amino acid residue selected from the group consisting of: K(NMeAC), Q, 4AmPhe, A, AIB, APEG2Ser, APEG2Ser(R*), APEG2Ser(S*), Cit, Dab(NMeAc), Dab(NMecarn), Dab(NMeCarn), Dab(NMeCOmPEG6), Dab(NMecPEG2a), Dab(NMecPEG3a), Dab(NMecPEG5a), Dap(NMeAc), F, K(4cpg), K(Ac), K(cPEG3a), K(Me)₃, K(NMeCOmPEG6), K(NMePEG3a), K(NmPEG6Ac), K(PEG2PEG2gEC12), K(PEG2PEG2gEC14), L, Paf(Ac), Q(N(Me)2), Q(NHtBu), W, Y and K(cPEG3aCO);
[0606] wherein when the amino acid residue at position Z¹⁰ is replaced with an amino acid residue that is different from the amino acid residue recited at said position, the amino acid residue at position Z¹⁰ is replaced with an amino acid residue selected from the group consisting of: AEF, 4DMPEF, 4DMPzEF, 4TMABYF, ACHMF, AEF((Ch)cPEG3a), AEF(Ac), AEF(AcCh), AEF(aPEG2a), AEF(BisMEP), AEF(BisMEPa), AEF(BisPEG2a)(RS), AEF(BisPEG2a)(S*), AEF(G), AEF(Me)2, AEF(MEP), AEF(MePrpa), AEF(N(Me)2), AEF(NHCh), AEF(NHcPEG3a), AEF(NMe), AEF(NMe2mPEG3), AEF(NMe3), AEF(NMeBismPEG3), AEF(NMePEG2a), AEF(NmPEG6), AEF(NsCh), AEF(PEG2a), AEF(SPD), APEG2F, APEG3F, dFPPEG3F, Diazabiclyclooctane6F, DMMMF, DMPMF, DMTASF, F(4G), F(4N3), F(4TzlDMA4mPEG), F(4TzlMME), F(4TzlMMo1), F(4TzlMMo3), F(4TzlMMo4), F(4TzlTMA1), F(4TzlTMA2), F(4TzlTMA3), F(4TzlTMA4), F(4TzlTMA5), GPEG3F, hFTMAPF, MMoEF, MMoPF, MMPEG3F, morfTMA4F, mPEG2TMA2F, mPEG2TMA4F, mPEG3TMA4F, MPzPEG3F, MTASF, NPyEF, NPyPEG3F, PiperazinequatF, TBAPEG3F, TMA3F, TMA4F, TMA6F, TMA8F, Tzl(Ch), TzlChmPEG, TzlChmPEG3, Y(C₉₀H), Y(OEOXIMECh), Y(OTzlCh), Y(OTzlChC16), Y(OTzlChC8), Y(OTzlC1aC8), Y(OTzlChmPEG), Y(OTzlChmPEG3), Y(OTzlPEG3a), Y(OTzlPEG4a), Y(OTzlTMA4), Y(OZOXIMECh), YC8CO(NHPEG3a), YC8COPip, YCF2H, ACHMF(R*, S*), ACHMF(S*, S*), AEF(cPEG3a), APF, F(4TzlAme2), F(4TzlG2), F(4TzlMMo7) and F(4TzlTMA7);
[0607] wherein when the amino acid residue at position Z¹¹ is replaced with an amino acid residue that is different from the amino acid residue recited at said position, the amino acid residue at position Z¹¹ is replaced with an amino acid residue selected from the group consisting of: A, F, L and W;
[0608] wherein when the amino acid residue at position Z¹² is replaced with an amino acid residue that is different from the amino acid residue recited at said position, the amino acid residue at position Z¹² is replaced with an amino acid residue selected from the group consisting of: A, Achx, Achx(diF), Acpx, Aib, AIB, aMeK, aMeL, Chg, diFCpx, F, L, Pip(NMe), Pip(NMe2), W and diFAchx;
[0609] wherein when the amino acid residue at position Z¹³ is replaced with an amino acid residue that is different from the amino acid residue recited at said position, the amino acid residue at position Z¹³ is replaced with an amino acid residue selected from the group consisting of: K(NMeAC), E, A, AIB, aMeE, APEG2Ser, APEG2Ser(S*), Cit, Dab(NMeAc), Dab(NMecarn), Dab(NMeCOmPEG6), Dab(NMecPEG2a), Dab(NMecPEG3a), Dap(Ac), Dap(NMeAc), E(c), E(C), F, K(5cpa), K(Ac), K(cPEG3a), K(d), K(D), K(dPEG12Ac), K(dPEG6Ac), K(dPEG9Ac), K(Me)₃, K(NMeCOmPEG6), K(NMeCOPEG4N+Me3), K(NMePEG3a), K(NmPEG6Ac), K(PEG2PEG2gEC12), K(PEG2PEG2gEC14), K(PEG2PEG2PEG2gEC12), L, Q(N(Me)2), Tetrazole, Tetrazole(NMe), W, K(DFN), K(IPB) and Nle;
[0610] wherein when the amino acid residue at position Z¹⁴ is replaced with an amino acid residue that is different from the amino acid residue recited at said position, the amino acid residue at position Z¹⁴ is replaced with an amino acid residue selected from the group consisting of: K(Ac) and N(NMe);
[0611] wherein when the amino acid residue at position Z¹⁵ is replaced with an amino acid residue that is different from the amino acid residue recited at said position, the amino acid residue at position Z¹⁵ is replaced with an amino acid residue selected from the group consisting of: 3pya, 5CF33Pya, 5MePyridinAla, bAla, dK, dL, F, f, H, h, k, N, NMe3Pya, NMebAla, NMeDTyr, orn, Paf, s, t, THP, v, y and A;
[0612] wherein when the amino acid residue at position Z¹⁶ is replaced with an amino acid residue that is different from the amino acid residue recited at said position, the amino acid residue at position Z¹⁶ is replaced with an amino acid residue selected from the group consisting of: 4diFPro, NMeDTyr, NMeK(PEG2PEG2C12), NMeK(PEG2PEG2C14), NMeK(PEG2PEG2gEC12), NMeK(PEG2PEG2gEC14), NMeK(PEG2PEG2K(PEG2PEG2gEC12)₂), NMeK(PEG2PEG2K(PEG2PEG2PEG2PEG2gEC12)₂), NMeK(PEG2PEG2PEG2gEC12), NMeK(PEG2PEG2PEG2PEG2gEC12), NMeK(PEG2PEG6gEC12), NMeK(PEG2PEG6gEC14), NMeK(SP6PEG2PEG2C12) and NMeK(SP6PEG2PEG2gEC12); and
[0613] at least one of the amino acid residues at positions Z³, Z⁵, Z⁶, Z⁷, Z⁸, Z¹⁰, Z¹¹, Z¹², Z¹³, Z¹⁴, Z¹⁵ and/or Z¹⁶, when an amino acid residue is present at the position, each independently comprise(s) at least one masked amine and/or masked amide.

### II. DEFINITIONS

[0614] Unless otherwise defined herein, scientific and technical terms used in this application shall have the meanings that are commonly understood by those of ordinary skill in the art.

[0615] “About” when referring to a value includes the stated value +/−10% of the stated value. For example, about 50% includes a range of from 45% to 55%, while about 20 molar equivalents includes a range of from 18 to 22 molar equivalents. Accordingly, when referring to a range, “about” refers to each of the stated values +/−10% of the stated value of each end of the range. For instance, a ratio of from about 1 to about 3 (weight/weight) includes a range of from 0.9 to 3.3.

[0616] “Patient” or “subject”, which are used interchangably, refer to a living organism, which includes, but is not limited to a human subject suffering from or prone to a disease or condition that can be treated by administration of a pharmaceutical composition as provided herein. Further non-limiting examples may include, but is not limited to humans, other mammals, bovines, rats, mice, dogs, monkeys, goat, sheep, cows, deer, horse, and other mammalian animals and the like. In some aspects, the patient is human.

[0617] Unless indicated otherwise the names of naturally occurring and non-naturally occurring aminoacyl residues used herein follow the naming conventions suggested by the IUPAC Commission on the Nomenclature of Organic Chemistry and the IUPAC-IUB Commission on Biochemical Nomenclature as set out in “Nomenclature of α-Amino Acids (Recommendations, 1974)” Biochemistry, 14(2), (1975). To the extent that the names and abbreviations of amino acids and aminoacyl residues employed in this specification and appended claims differ from those suggestions, they will be made clear to the reader. In sequences of amino acids that represent IL-23 inhibitors the individual amino acids are separated by a hyphen “−” or brackets e.g, lysine is shown as [K].

[0618] Throughout the present specification, unless naturally occurring amino acids are referred to by their full name (e.g., alanine, arginine, etc.), they are designated by their conventional three-letter or single-letter abbreviations (e.g., Ala or A for alanine, Arg or R for arginine, etc.). Unless otherwise indicated, three-letter and single-letter abbreviations of amino acids refer to the L-isomeric form of the amino acid in question. The term “L-amino acid,” as used herein, refers to the “L” isomeric form of a peptide, and conversely the term “D-amino acid” refers to the “D” isomeric form of a peptide (e.g., (D)Asp or D-Asp; (D)Phe or D-Phe). Amino acid residues in the D isomeric form can be substituted for any L-amino acid residue, as long as the desired function is retained by the peptide. D-amino acids may be indicated as customary in lower case when referred to using single-letter abbreviations. For example, L-arginine can be represented as “Arg” or “R,” while D-arginine can be represented as “arg” or “r.” Similarly, L-lysine can be represented as “Lys” or “K,” while D-lysine can be represented as “lys” or “k.” Alternatively, a lower case “d” in front of an amino acid can be used to indicate that it is of the D isomeric form, for example D-lysine can be represented by dK.

[0619] In the case of less common or non-naturally occurring amino acids, unless they are referred to by their full name (e.g. sarcosine, ornithine, etc.), frequently employed three- or four-character codes are employed for residues thereof, including, Sar or Sarc (sarcosine, i.e. N-methylglycine), Aib (α-aminoisobutyric acid), Dab (2,4-diaminobutanoic acid), Dapa (2,3-diaminopropanoic acid), γ-Glu (γ-glutamic acid), Gaba (γ-aminobutanoic acid), β-Pro (pyrrolidine-3-carboxylic acid), and Abu (2-amino butyric acid).

[0620] Amino acids of the D-isomeric form may be located at any of the positions in the IL-23R inhibitors set forth herein (any of X1-X18 appearing in the molecule). In an aspect, amino acids of the D-isomeric form may be located only at any one or more of X3, X5, X6, X8, X13, and optionally one additional position. In other aspects, amino acids of the D-isomeric form may be located only at any one or more of X3, X8, X13, and optionally one additional position. In other aspects, amino acids of the D-isomeric form may be located only at any one or more of X8, X13 (e.g., X8 is dK(Ac) and X13 is dE), and optionally one additional position. In other aspects, amino acids of the D-isomeric form may be located only at X3, and optionally one additional position. In other aspects, amino acids of the D-isomeric form may be located only at X3, and optionally two or three additional positions. In other aspects, amino acids of the D-isomeric form may be located at only one or two of positions X1 to X18 appearing in the IL-23R inhibitors set forth herein. In other aspects, amino acids of the D-isomeric form may be located at only three or four of positions X1 to X18 appearing in the IL-23R inhibitors set forth herein. For example an IL-23R inhibitors set forth herein having only positions X3 to X15 present may have amino acids of the D-form present in 3 or four of those positions. In other aspects, amino acids of the D-isomeric form may be located at only five or six of positions X1 to X18 appearing in the IL-23R inhibitors set forth herein.

[0621] As is clear to the skilled artisan, the peptide sequences disclosed herein are shown proceeding from left to right, with the left end of the sequence being the N-terminus of the peptide and the right end of the sequence being the C-terminus of the peptide. Among sequences disclosed herein are sequences incorporating either an “—OH” moiety or an “—NH₂” moiety at the carboxy terminus (C-terminus) of the sequence. In such cases, and unless otherwise indicated, an “—OH” or an “—NH₂” moiety at the C-terminus of the sequence indicates a hydroxy group or an amino group, corresponding to the presence of a carboxylic acid (COOH) or an amido (CONH₂) group at the C-terminus, respectively. In each sequence of the invention, a C-terminal “—OH” moiety may be substituted for a C-terminal “—NH₂” moiety, and vice-versa

[0622] As used herein, the term “amino acid,” in its broadest sense, refers to any compound and/or substance that can be incorporated into a polypeptide chain. In some embodiments, an amino acid has the general structure H₂N—C(H)(R)—COOH. In some embodiments, an amino acid is a naturally occurring amino acid. In some embodiments, an amino acid is a synthetic amino acid; in some embodiments, an amino acid is a D-amino acid; in some embodiments, an amino acid is an L-amino acid. “Standard amino acid” refers to any of the twenty standard L-amino acids commonly found in naturally occurring peptides. “Nonstandard amino acid” refers to any amino acid, other than the standard amino acids, regardless of whether it is prepared synthetically or obtained from a natural source. As used herein, “synthetic amino acid” encompasses chemically modified amino acids, including but not limited to salts, amino acid derivatives (such as amides), and/or substitutions. Amino acids, including carboxy- and/or amino-terminal amino acids in peptides, can be modified by methylation, amidation, acetylation, protecting groups, and/or substitution with other chemical groups that can change the peptide's circulating half-life without adversely affecting their activity. Amino acids may participate in forming a bridge for cyclization such as a thio ether bond and a disulfide bond for forming a cyclic portion of a peptide, for example as in the connection between the amino acid residue at position Z4 and amino acid residue at position Z9 in various embodiments discussed herein. Amino acids may comprise one or more post-translational modifications, such as association with one or more chemical entities (e.g., methyl groups, acetate groups, acetyl groups, phosphate groups, formyl moieties, isoprenoid groups, sulfate groups, polyethylene glycol moieties, lipid moieties, carbohydrate moieties, biotin moieties, etc.). The term “amino acid” is used interchangeably with “amino acid residue,” and may refer to a free amino acid and/or to an amino acid residue of a peptide. It will be apparent from the context in which the term is used whether it refers to a free amino acid or a residue of a peptide.

[0623] As used herein, “Hydrophilic Amino Acid or Residue” refers to an amino acid or residue having a side chain exhibiting a hydrophobicity of less than zero according to the normalized consensus hydrophobicity scale of Eisenberg et al., 1984, J. Mol. Biol. 179:125-142. Examples of hydrophilic amino acids include but are not limited to L-Thr (T), L-Ser (S), L-His (H), L-Glu (E), L-Asn (N), L-Gln (Q), L-Asp (D), L-Lys (K) and L-Arg (R).

[0624] As used herein, “Acidic Amino Acid or Residue” refers to a hydrophilic amino acid or residue having a side chain exhibiting a pK value of less than about 6 when the amino acid is included in a peptide or polypeptide. Acidic amino acids typically have negatively charged side chains at physiological pH due to loss of a hydrogen ion. Examples of acidic amino acids include but are not limited to L-Glu (E) and L-Asp (D)

[0625] As used herein, “Basic Amino Acid or Residue” refers to a hydrophilic amino acid or residue having a side chain exhibiting a pK value of greater than about 6 when the amino acid is included in a peptide or polypeptide. Basic amino acids typically have positively charged side chains at physiological pH due to association with hydronium ion. Examples of basic amino acids include but are not limited to L-Arg (R) and L-Lys (K)

[0626] As used herein, “Polar Amino Acid or Residue” refers to a hydrophilic amino acid or residue having a side chain that is uncharged at physiological pH, but which has at least one bond in which the pair of electrons shared in common by two atoms is held more closely by one of the atoms. Examples of polar amino acids include but are not limited to L-Asn (N), L-Gln (Q), L-Ser (S) and L-Thr (T).

[0627] As used herein, “Hydrophobic Amino Acid or Residue” refers to an amino acid or residue having a side chain exhibiting a hydrophobicity of greater than zero according to the normalized consensus hydrophobicity scale of Eisenberg et al., 1984, J. Mol. Biol. 179:125-142. Examples of hydrophobic amino acids include but are not limited to L-Pro (P), L-Ile (I), L-Phe (F), L-Val (V), L-Leu (L), L-Trp (W), L-Met (M), L-Ala (A) and L-Tyr (Y).

[0628] As used herein, “Aromatic Amino Acid or Residue” refers to a hydrophilic or hydrophobic amino acid or residue having a side chain that includes at least one aromatic or heteroaromatic ring. Examples of aromatic amino acids include but are not limited to L-Phe (F), L-Tyr (Y), L-His (H), 2-Nal, substituted 2-Nal, AEF, substituted AEF, L-Trp (W), Trp or substituted Trp. Although owing to the pKa of its heteroaromatic nitrogen atom L-His (H) it is sometimes classified as a basic residue, herein histidine is classified as an aromatic residue as its side chain includes a heteroaromatic ring.

[0629] As used herein, “Non-polar Amino Acid or Residue” refers to a hydrophobic amino acid or residue having a side chain that is uncharged at physiological pH and which has bonds in which the pair of electrons shared in common by two atoms is generally held equally by each of the two atoms (i.e., the side chain is not polar). Examples of non-polar amino acids include but are not limited to L-Gly (G), L-Leu (L), L-Val (V), L-Ile (I), L-Met (M), L-Pro (P) and L-Ala (A).

[0630] As used herein, “Aliphatic Amino Acid or Residue” refers to a hydrophobic amino acid or residue having an aliphatic hydrocarbon side chain. Examples of aliphatic amino acids include but are not limited to L-Ala (A), L-Val (V), L-Leu (L) and L-Ile (I).

[0631] The amino acid L-Cys (C) is unusual in that it can form disulfide bridges with other L-Cys (C) amino acids or other sulfanyl- or sulfhydryl-containing amino acids. As used herein, “cysteine-like amino acids or residues” includes cysteine and other amino acids that contain sulfhydryl moieties that are available for formation of disulfide bridges. The ability of L-Cys (C) (and other amino acids with SH containing side chains) to exist in a peptide in either the reduced free SH or oxidized disulfide-bridged form affects whether L-Cys (C) contributes net hydrophobic or hydrophilic character to a peptide. While L-Cys (C) exhibits a hydrophobicity of 0.29 according to the normalized consensus scale of Eisenberg (Eisenberg et al., 1984, supra), it is to be understood that for purposes of the present disclosure L-Cys (C) is categorized into its own unique group. Examples of “cysteine-like amino acids or residues” include but are not limited to (R)-2-amino-3-mercapto-3-methylbutanoic acid (Pen) and L-homocysteine (hC).

[0632] The term “quaternary amine” takes its ordinary meaning in the art. For example, a quaternary amine is a substituent comprising one or more nitrogen atom(s) that is/are permanently positively changed. The permanent positive charge of the nitrogen atom(s) may be independent of the surrounding pH. One non-limiting example of a quaternary amine can be a moiety having four organic substituents on a nitrogen atom.

[0633] The term “masked amine” means a substituent comprising one or more nitrogen atom(s), wherein the one or more nitrogen atom(s) is/are substituted. For example, the one or more nitrogen atom(s) may be substituted with groups such as alkyl or acetyl, to form secondary amine(s), tertiary amine(s) or amides. In embodiments, a masked amine is a secondary amine. In embodiments, a masked amine is a tertiary amine. In embodiments, a masked amine is an amide.

[0634] The term “masked amide” means a substituent comprising one or more nitrogen atom(s), wherein the one or more nitrogen atom(s) is/are substituted with —C ═O, and at least one other substituent. For example, the one or more nitrogen atom(s) substituted with —C═O may be further substituted with groups such as alkyl or acetyl, to form secondary amide(s) or tertiary amides. In embodiments, a masked amide is a secondary amide. In some embodiments, a masked amide is a tertiary amide.

[0635] One of skill in the art will appreciate that certain amino acids and other chemical moieties are modified when bound to another molecule. For example, an amino acid side chain may be modified when it forms an intramolecular bridge with another amino acid side chain, e.g., one or more hydrogen may be removed or replaced by the bond.

[0636] A “compound of the invention”, an “inhibitor of the present disclosure”, an “IL-23R inhibitor of the present disclosure”, a “compound described herein”, and a “herein-described compound” include the novel compounds disclosed herein, for example the compounds of any of the Examples, including compounds of Formula (I) to (VI) such as those found in Table 1A, Table 1B, Table 1C, Table 1D, or Table 1E.

[0637] “Pharmaceutically effective amount” refers to an amount of a compound of the invention in a composition or combination thereof that provides the desired therapeutic or pharmaceutical result.

[0638] By “pharmaceutically acceptable” it is meant the carrier(s), diluent(s), salts, or excipient(s) must be compatible with the other components or ingredients of the compositions of the present invention, i.e., that which is useful, safe, non-toxic acceptable for pharmaceutical use. In accordance with the present invention pharmaceutically acceptable means approved or approvable as is listed in the U.S. Pharmacopoeia or other generally recognized pharmacopoeia for use in animals, and more particularly, in humans.

[0639] “Pharmaceutically acceptable excipient” includes without limitation any adjuvant, carrier, excipient, glidant, sweetening agent, diluent, preservative, dye/colorant, flavor enhancer, surfactant, wetting agent, dispersing agent, suspending agent, stabilizer, isotonic agent, solvent, or emulsifier which has been approved by the United States Food and Drug Administration as being acceptable for use in humans or domestic animals.

[0640] “Absorption enhancer” refers to a component that improves or facilitates the mucosal absorption of a drug in the gastrointestinal tract, such as a permeation enhancer or intestinal permeation enhancer. As conventionally understood in the art, permeation enhancers (PEs) are agents aimed to improve oral delivery of therapeutic drugs with poor bioavailability. PEs are capable of increasing the paracellular and/or transcellular passage of drugs.

[0641] Pharmaceutical excipients that can increase permeation have been termed “absorption modifying excipients” (AMEs). AMEs may be used in oral compositions, for example, as wetting agents (sodium dodecyl sulfate), antioxidants (e.g. EDTA), and emulsifiers (e.g. macrogol glycerides), and may be specifically included in compositions as PEs to improve bioavailability. PEs can be categorized as to how they alter barrier integrity via paracellular or transcellular routes.

[0642] “Intestinal permeation enhancer (IPE)” refers to a component that improves the bioavailability of a component. Suitable representative IPEs for use in the present invention, include, but are not limited to, various surfactants, fatty acids, medium chain glycerides, steroidal detergents, acyl carnitine and alkanoylcholines, N-acetylated alpha-amino acids and N-acetylated non-alpha-amino acids, and chitosans, other mucoadhesive polymers and the like. For example, a suitable IPE for use in the present invention may be sodium caprate.

[0643] “Composition” or “Pharmaceutical Composition” as used herein is intended to encompass an invention or product comprising the specified active product ingredient (API), which may include pharmaceutically acceptable excipients, carriers or diluents as described herein, such as in specified amounts defined throughout the disclosure. Compositions or Pharmaceutical Compositions result from combination of specific components, such as specified ingredients in the specified amounts as described herein.

[0644] Compositions or pharmaceutical compositions of the present invention may be in different pharmaceutically acceptable forms, which may include, but are not limited to a liquid composition, a tablet or matrix composition, a capsule composition, etc. and the like. When the composition is a tablet composition, the tablet may include, but is not limited to different layers two or more different phases, including an internal phase and an external phase that can comprise a core. The tablet composition can also include, but is not limited to, one or more coatings.

[0645] “Solvate” as used herein, means a physical association of the compound of the present invention with one or more solvent molecules. This physical association involves varying degrees bonding, including hydrogen bonding. In certain instances, the solvate will be capable of isolation. The term “solvate” is intended to encompass both solution-phase and isolatable solvates. Non-limiting examples of suitable solvates include hydrates.

[0646] Provided are also pharmaceutically acceptable salts and tautomeric forms of the compounds described herein. “Pharmaceutically acceptable” or “physiologically acceptable” refer to compounds, salts, compositions, dosage forms and other materials which are useful in preparing a pharmaceutical composition that is suitable for veterinary or human pharmaceutical use.

[0647] The IL-23R inhibitors of the present disclosure, or their pharmaceutically acceptable salts or solvates may contain one or more asymmetric centers and may thus give rise to enantiomers, diastereomers, and other stereoisomeric forms that may be defined, in terms of absolute stereochemistry, as (R)- or (S)- or, as (D)- or (L)- for amino acids. The present disclosure is meant to include all such possible isomers, as well as their racemic and optically pure forms of the IL-23R inhibitors of the present disclosure. Optically active (+) and (−), (R)- and (S)-, or (D)- and (L)- isomers may be prepared using chiral synthons or chiral reagents, or resolved using conventional techniques, for example, chromatography and fractional crystallization. Conventional techniques for the preparation/isolation of individual enantiomers include chiral synthesis from a suitable optically pure precursor or resolution of the racemate (or the racemate of a salt or derivative) using, for example, chiral high pressure liquid chromatography (HPLC). When the compounds described herein contain olefinic double bonds or other centers of geometric asymmetry, and unless specified otherwise, it is intended that the compounds include both E and Z geometric isomers. Likewise, all tautomeric forms are also intended to be included. Where compounds are represented in their chiral form, it is understood that the aspect encompasses, but is not limited to, the specific diastereomerically or enantiomerically enriched form. Where chirality is not specified but is present, it is understood that the aspect is directed to either the specific diastereomerically or enantiomerically enriched form; or a racemic or scalemic mixture of such compound(s). As used herein, “scalemic mixture” is a mixture of stereoisomers enantiomers at a ratio other than 1:1.

[0648] Certain examples contain amino acids that are depicted or labelled as an (R*) or (S*). When (R*) or (S*) is used in the name of an amino acid or in the chemical representation of the amino acid, it is intended to convey that the amino acid is a pure single isomer at that stereocenter; however, absolute configuration of that stereocenter has not been established. Thus, a compound designated as (R*) refers to an amino acid that is a pure single isomer at that stereocenter with an absolute configuration of either (R) or (S), and a compound designated as (S*) refers to an amino acid that is a pure single isomer at that stereocenter with an absolute configuration of either (R) or (S). For example, ACHMF(S*):

[chemical structure]

refers to an amino acid that is either:

[chemical structure]

[0649] “Racemates” refers to a mixture of enantiomers. The mixture can include equal or unequal amounts of each enantiomer.

[0650] “Stereoisomer” and “stereoisomers” refer to compounds that differ in the chirality of one or more stereo centers. Stereoisomers include enantiomers and diastereomers.

[0651] The compounds may exist in stereoisomeric form if they possess one or more asymmetric centers or a double bond with asymmetric substitution and, therefore, can be produced as individual stereoisomers or as mixtures. Unless otherwise indicated, the description is intended to include individual stereoisomers as well as mixtures. The methods for the determination of stereochemistry and the separation of stereoisomers are well-known in the art (see, e.g., Chapter 4 of Advanced Organic Chemistry, 4th ed., J. March, John Wiley and Sons, New York, 1992).

[0652] “Tautomer” refers to alternate forms of a compound that differ in the position of a proton, such as enol-keto and imine-enamine tautomers, or the tautomeric forms of heteroaryl groups containing a ring atom attached to both a ring —NH— and a ring ═N— such as pyrazoles, imidazoles, benzimidazoles, triazoles, and tetrazoles.

[0653] Unless defined otherwise, all technical and scientific terms used herein have the same meaning as commonly or conventionally understood by one of ordinary skill in the art. In the chemical arts a dash at the front or end of a chemical group is a matter of convenience; chemical groups may be depicted with or without one or more dashes without losing their ordinary meaning. A wavy line drawn through a line in a structure indicates a point of attachment of a group. A dashed line indicates an optional bond. Unless chemically or structurally required, no directionality is indicated or implied by the order in which a chemical group is written or the point at which it is attached to the remainder of the molecule. For instance, the group “—SO₂CH₂—” is equivalent to “—CH₂SO₂—” and both may be connected in either direction. Similarly, an “arylalkyl” group, for example, may be attached to the remainder of the molecule at either an aryl or an alkyl portion of the group. A prefix such as “Cu ” or (Cᵤ-Cᵥ) indicates that the following group has from u to v carbon atoms. For example, “C₁-6alkyl” and “C₁-C₆ alkyl” both indicate that the alkyl group has from 1 to 6 carbon atoms.

[0654] “Treatment” or “treat” or “treating” as used herein refers to an approach for obtaining beneficial or desired results. For purposes of the present invention, beneficial or desired results include, but are not limited to, alleviation of a symptom and/or diminishment of the extent of a symptom and/or preventing a worsening of a symptom associated with a disease or condition. In one aspect, “treatment” or “treating” includes one or more of the following: (a) inhibiting the disease or condition (e.g., decreasing one or more symptoms resulting from the disease or condition, and/or diminishing the extent of the disease or condition); (b) slowing or arresting the development of one or more symptoms associated with the disease or condition (e.g., stabilizing the disease or condition, delaying the worsening or progression of the disease or condition); and (c) relieving the disease or condition, e.g., causing the regression of clinical symptoms, ameliorating the disease state, delaying the progression of the disease, increasing the quality of life, and/or prolonging survival.

[0655] “Therapeutically effective amount” or “effective amount” as used herein refers to an amount that is effective to elicit the desired biological or medical response, including the amount of a compound that, when administered to a subject for treating a disease is sufficient to effect such treatment for the disease. The effective amount will vary depending on the compound, the disease, and its severity and the age, weight, etc., of the subject to be treated. The effective amount can include a range of amounts. As is understood in the art, an effective amount may be in one or more doses, i.e., a single dose or multiple doses may be required to achieve the desired treatment endpoint. An effective amount may be considered in the context of administering one or more therapeutic agents, and a single agent may be considered to be given in an effective amount if, in conjunction with one or more other agents, a desirable or beneficial result may be or is achieved. Suitable doses of any co-administered compounds may optionally be lowered due to the combined action (e.g., additive or synergistic effects) of the compounds.

[0656] “Co-administration” as used herein refers to administration of unit dosages of the compounds disclosed herein before or after administration of unit dosages of one or more additional therapeutic agents, for example, administration of the compound disclosed herein within seconds, minutes, or hours of the administration of one or more additional therapeutic agents. For example, in some aspects, a unit dose of a compound of the invention is administered first, followed within seconds or minutes by administration of a unit dose of one or more additional therapeutic agents. Alternatively, in other aspects, a unit dose of one or more additional therapeutic agents is administered first, followed by administration of a unit dose of a compound of the invention within seconds or minutes. In some aspects, a unit dose of a compound of the invention is administered first, followed, after a period of hours (e.g., 1-12 hours), by administration of a unit dose of one or more additional therapeutic agents. In other aspects, a unit dose of one or more additional therapeutic agents is administered first, followed, after a period of hours (e.g., 1-12 hours), by administration of a unit dose of a compound of the invention. Co-administration of a compound disclosed herein with one or more additional therapeutic agents generally refers to simultaneous or sequential administration of a compound disclosed herein and one or more additional therapeutic agents, such that therapeutically effective amounts of each agent are present in the body of the patient.

[0657] Abbreviation, “(V/V)” refers to the phrase “volume for volume”, i.e., the proportion of a particular substance within a mixture, as measured by volume or a volume amount of a component of the composition disclosed herein relative to the total volume amount of the composition. Accordingly, the quantity is unit less and represents a volume percentage amount of a component relative to the total volume of the composition. For example, a 2% (V/V) solvent mixture can indicate 2 mL of one solvent is present in 100 mL of the solvent mixture.

[0658] Abbreviation, “(w/w)” refers to the phrase “weight for weight”, i.e., the proportion of a particular substance within a mixture, as measured by weight or mass or a weight amount of a component of the composition disclosed herein relative to the total weight amount of the composition. Accordingly, the quantity is unit less and represents a weight percentage amount of a component relative to the total weight of the composition. For example, a 2% (w/w) solution can indicate 2 grams of solute is dissolved in 100 grams of solution.

[0659] Systemic routes of administration as conventionally understood in the medicinal or pharmaceutical arts, refer to or are defined as a route of administration of drug, a pharmaceutical composition or formulation, or other substance into the circulatory system so that various body tissues and organs are exposed to the drug, formulation or other substance. As conventionally understood in the art, administration can take place orally (where drug or oral preparations are taken by mouth, and absorbed via the gastrointestinal tract), via enteral administration (absorption of the drug also occurs through the gastrointestinal tract) or parenteral administration (generally injection, infusion, or implantation, etc.

[0660] “Systemically active” peptide drug therapy as it relates to the present invention generally refers to treatment by means of a pharmaceutical composition comprising a peptide active ingredient, wherein said peptide resists immediate metabolism and/or excretion resulting in its exposure in various body tissues and organs, such as the cardiovascular, respiratory, gastrointestinal, nervous or immune systems.

[0661] Systemic drug activity in the present invention also refers to treatment using substances that travel through the bloodstream, reaching and affecting cells in various body tissues and organs. Systemic active drugs are transported to their site of action and work throughout the body to attack the physiological processes that cause inflammatory diseases.

[0662] “Bioavailability” refers to the extent and rate at which the active moiety (drug or metabolite) enters systemic circulation, thereby accessing the site of action. Bioavailability of a drug is impacted by the properties of the dosage form, which depend partly on its design and manufacture.

[0663] “Digestive tract tissue” as used herein refers to all the tissues that comprise the organs of the alimentary canal. For example only, and without limitation, “digestive tract tissue” includes tissues of the mouth, esophagus, stomach, small intestine, large intestine, duodenum, and anus.

[0664] As used herein, the term “natural polymer” takes its ordinary meaning in the art. For example, a polymer that can be found in living systems, such as plants, animals, bacteria, and fungi. A natural polymer may be a polypeptide, polysaccharide or polynucleotide. Subunits of natural polymers can be amino acids, monosaccharides or nucleotides. A natural polymer can vary in type (e.g., homopolymer or copolymer; random, alternating or block copolymer; linear or branched). A non-limiting example of a natural polymeric group is an amino acid sequence containing from about 10 to about 30 amino acids derived from (poly)peptides such as, natriuretic peptide precursor C, atrial natriuretic peptide, brain natriuretic peptide, serum albumin, IgG, histidine-rich glycoproteins, fibronectin, fibrinogen, zinc finger-containing polypeptides, osteocrin or fibroblast growth factor 2 (FGF2), or variants thereof with substitutions and/or deletions.

[0665] As used herein, the term “unnatural polymer” takes its ordinary meaning in the art. For example, a synthetic polymer that does not naturally occur in a living system, such as plants, animals, bacteria, and fungi. An unnatural polymer can vary in type (e.g., homopolymer or copolymer; random, alternating or block copolymer; linear or branched). A non-limiting example of an unnatural polymeric group is polyethylene glycol (PEG) (also called polyethylene oxide (PEO)).

[0666] As used herein, “hydrophilic polymer” takes its ordinary meaning in the art. For example, a polymer which dissolves in water. A hydrophilic polymer may comprise polar or charged functional groups that render the polymer soluble in water. A hydrophilic polymer may be a natural polymer or an unnatural polymer or a combination thereof. A hydrophilic polymer can vary in type (e.g., homopolymer or copolymer; random, alternating or block copolymer; linear or branched). A non-limiting example of a hydrophilic polymer includes polyethylene glycol (PEG).

### Chemical Definitions

[0667] Acyl: As used herein, the term “acyl” refers to R^{Z}—(C═O)—, wherein R^{Z} is, for example, any alkyl, alkenyl, alkynyl, heteroalkyl or heteroalkenyl.

[0668] Aliphatic: As used herein, the term aliphatic in the context of chemical substituents refers to a hydrocarbon and includes both saturated and unsaturated hydrocarbons. An aliphatic may be linear, branched, or cyclic. For example, C₁-C₁₀ aliphatics can include C₁-C₁₀ alkyls (e.g., linear or branched C₁-C₁₀ saturated alkyls), C₂-C₁₀ alkenyls (e.g., linear or branched C₄-C₁₀ dienyls, linear or branched C₆-C₁₀ trienyls, and the like), and C₂-C₁₀ alkynyls (e.g., linear or branched C₂-C₁₀ alkynyls). C₁-C₁₀ aliphatics can include C₃-C₁₀ cyclic aliphatics (e.g., C₃-C₁₀ cycloalkyls, C₄-C₁₀ cycloalkenyls, or C₅-C₁₀ cycloalkynyls). In certain embodiments, the aliphatic may comprise one or more cyclic aliphatic and/or one or more heteroatoms such as oxygen, nitrogen, or sulfur and may optionally be substituted with one or more substituents such as alkyl, halo, alkoxyl, hydroxy, amino, aryl, ether, ester or amide. An aliphatic group is unsubstituted or substituted with one or more substituent groups as described herein. For example, an aliphatic may be substituted with one or more (e.g., 1, 2, 3, 4, 5, or 6 independently selected substituents) of halogen, —COR^{aa}, —CO₂H, —CONH₂, —CO₂R″, —CN, —OH, —OR^{aa}, —OCOR^{aa}, —OCO₂R″, —NH₂, —NHR″, —N(R^{aa})₂, —SR″ or —SO₂R″, wherein each instance of R″ independently is C₁-C₁₀ aliphatic (e.g., C₁-C₁₀ alkyl, C₁-C₈ alkyl, C₁-C₆ alkyl, or C₁-C₃ alkyl). In embodiments, R″ independently is an unsubstituted alkyl (e.g., unsubstituted C₁-C₁₀ alkyl, C₁-C₈ alkyl, C₁-C₆ alkyl, or C₁-C₃ alkyl). In embodiments, R″ independently is unsubstituted C₁-C₃ alkyl. In embodiments, the aliphatic is unsubstituted. In embodiments, the aliphatic does not include any heteroatoms.

[0669] Alkyl: As used herein, the term “alkyl” refers to a radical of an acyclic linear and branched hydrocarbon groups, e.g. “C₁-C₆ alkyl” refers to alkyl groups having 1-6 carbons. An alkyl group may be linear or branched. Examples of alkyl groups include, but are not limited to, methyl, ethyl, n-propyl, isopropyl, butyl, isobutyl, sec-butyl, tert-butyl, pentyl, isopentyl tert-pentylhexyl, isohexyl, etc. The term “lower alkyl” means an alkyl group straight chain or branched alkyl having 1 to 6 carbon atoms. Other alkyl groups will be readily apparent to those of skill in the art given the benefit of the present disclosure. An alkyl group may be unsubstituted or substituted with one or more substituent groups as described herein. For example, an alkyl group may be substituted with one or more (e.g., 1, 2, 3, 4, 5, or 6 independently selected substituents) of halogen, —COR^{aa}, —CO₂H, —CONH₂, —CO₂R″, —CN, —OH, —OR^{aa}, —OCOR^{aa}, —OCO₂R″, —NH₂, —NHR″, —N(R^{aa})₂, —SR″ or —SO₂R″, wherein each instance of R″ independently is C₁-C₁₀ aliphatic (e.g., C₁-C₁₀ alkyl, C₁-C₈ alkyl, C₁-C₆ alkyl, or C₁-C₃ alkyl). In embodiments, R″ independently is an unsubstituted alkyl (e.g., unsubstituted C₁-C₁₀ alkyl, C₁-C₈ alkyl, C₁-C₆ alkyl, or C₁-C₃ alkyl). In embodiments, R″ independently is unsubstituted C₁-C₃ alkyl. In embodiments, the alkyl is substituted (e.g., with 1, 2, 3, 4, 5, or 6 substituent groups as described herein). In embodiments, an alkyl group is substituted with a —OH group and may also be referred to herein as a “hydroxyalkyl” group, where the prefix denotes the —OH group and “alkyl” is as described herein.

[0670] For example, “alkyl” refers to a radical of a straight-chain or branched saturated hydrocarbon group having from 1 to 10 carbon atoms (“C₁-C₁₀ alkyl”). In some embodiments, an alkyl group has 1 to 9 carbon atoms (“C₁-C₉ alkyl”). In some embodiments, an alkyl group has 1 to 8 carbon atoms (“C₁-C₈ alkyl”). In some embodiments, an alkyl group has 1 to 7 carbon atoms (“C₁-C₇ alkyl”). In some embodiments, an alkyl group has 1 to 6 carbon atoms (“C₁-C₆ alkyl”). In some embodiments, an alkyl group has 1 to 5 carbon atoms (“C₁-C₅ alkyl”). In some embodiments, an alkyl group has 1 to 4 carbon atoms (“C₁-C₄ alkyl”). In some embodiments, an alkyl group has 1 to 3 carbon atoms (“C₁-C₃ alkyl”). In some embodiments, an alkyl group has 1 to 2 carbon atoms (“C₁-C₂ alkyl”). In some embodiments, an alkyl group has 1 carbon atom (“C₁ alkyl”). In some embodiments, an alkyl group has 2 to 6 carbon atoms (“C₂-C₆ alkyl”). Examples of C₁-C₆ alkyl groups include, without limitation, methyl (C₁), ethyl (C₂), n-propyl (C₃), isopropyl (C₃), n-butyl (C₄), tert-butyl (C₄), sec-butyl (C₄), iso-butyl (C₄), n-pentyl (C₅), 3-pentanyl (C₅), amyl (C₅), neopentyl (C₅), 3-methyl-2-butanyl (C₅), tertiary amyl (C₅), and n-hexyl (C₆). Additional examples of alkyl groups include n-heptyl (C₇), n-octyl (C₈) and the like. Unless otherwise specified, each instance of an alkyl group is independently unsubstituted (an “unsubstituted alkyl”) or substituted (a “substituted alkyl”) with one or more substituents. In certain embodiments, the alkyl group is an unsubstituted C₁-C₆ alkyl. In certain embodiments, the alkyl group is a substituted C₁-C₆ alkyl.

[0671] Affixing the suffix “-ene” to a group indicates the group is a divalent moiety, e.g., arylene is the divalent moiety of aryl, and heteroarylene is the divalent moiety of heteroaryl.

[0672] Alkylene: The term “alkylene,” as used herein, represents a saturated divalent straight or branched chain hydrocarbon group and is exemplified by methylene, ethylene, isopropylene and the like. Likewise, the term “alkenylene” as used herein represents an unsaturated divalent straight or branched chain hydrocarbon group having one or more unsaturated carbon-carbon double bonds that may occur in any stable point along the chain, and the term “alkynylene” herein represents an unsaturated divalent straight or branched chain hydrocarbon group having one or more unsaturated carbon-carbon triple bonds that may occur in any stable point along the chain. In certain embodiments, an alkylene, alkenylene, or alkynylene group may comprise one or more cyclic aliphatic and/or one or more heteroatoms such as oxygen, nitrogen, or sulfur and may optionally be substituted with one or more substituents such as alkyl, halo, alkoxyl, hydroxy, amino, aryl, ether, ester or amide. For example, an alkylene, alkenylene, or alkynylene may be substituted with one or more (e.g., 1, 2, 3, 4, 5, or 6 independently selected substituents) of halogen, —COR^{aa}, —CO₂H, —CONH₂, —CO₂R″, —CN, —OH, —OR^{aa}, —OCOR^{aa}, —OCO₂R″, —NH₂, —NHR″, —N(R^{aa})₂, —SR″ or —SO₂R″, wherein each instance of R″ independently is C₁-C₁₀ aliphatic (e.g., C₁-C₁₀ alkyl, C₁-C₈ alkyl, C₁-C₆ alkyl, or C₁-C₃ alkyl). In embodiments, R″ independently is an unsubstituted alkyl (e.g., unsubstituted C₁-C₁₀ alkyl, C₁-C₈ alkyl, C₁-C₆ alkyl, or C₁-C₃ alkyl). In embodiments, R″ independently is unsubstituted C₁-C₃ alkyl. In certain embodiments, an alkylene, alkenylene, or alkynylene is unsubstituted. In certain embodiments, an alkylene, alkenylene, or alkynylene does not include any heteroatoms.

[0673] Alkenyl: As used herein, “alkenyl” refers to a radical of any linear or branched hydrocarbon chains having one or more unsaturated carbon-carbon double bonds that may occur in any stable point along the chain, e.g. “C₂-C₁₀ alkenyl” refers to an alkenyl group having 2-10 carbons. For example, an alkenyl group includes prop-2-enyl, but-2-enyl, but-3-enyl, 2-methylprop-2-enyl, hex-2-enyl, hex-5-enyl, 2,3-dimethylbut-2-enyl, and the like. In embodiments, the alkenyl comprises 1, 2, or 3 carbon-carbon double bond. In embodiments, the alkenyl comprises a single carbon-carbon double bond. In embodiments, multiple double bonds (e.g., 2 or 3) are conjugated. An alkenyl group may be unsubstituted or substituted with one or more substituent groups as described herein. For example, an alkenyl group may be substituted with one or more (e.g., 1, 2, 3, 4, 5, or 6 independently selected substituents) of halogen, —COR^{aa}, —CO₂H, —CONH₂, —CO₂R″, —CN, —OH, —OR^{aa}, —OCOR^{aa}, —OCO₂R″, —NH₂, —NHR″, —N(R^{aa})₂, —SR″ or —SO₂R″, wherein each instance of R″ independently is C₁-C₁₀ aliphatic (e.g., C₁-C₁₀ alkyl, C₁-C₈ alkyl, C₁-C₆ alkyl, or C₁-C₃ alkyl). In embodiments, R″ independently is an unsubstituted alkyl (e.g., unsubstituted C₁-C₁₀ alkyl, C₁-C₈ alkyl, C₁-C₆ alkyl, or C₁-C₃ alkyl). In embodiments, R″ independently is unsubstituted C₁-C₃ alkyl. In embodiments, the alkenyl is unsubstituted. In embodiments, the alkenyl is substituted (e.g., with 1, 2, 3, 4, 5, or 6 substituent groups as described herein). In embodiments, an alkenyl group is substituted with a —OH group and may also be referred to herein as a “hydroxyalkenyl” group, where the prefix denotes the —OH group and “alkenyl” is as described herein.

[0674] For example, “alkenyl” refers to a radical of a straight-chain or branched hydrocarbon group having from 2 to 10 carbon atoms and one or more carbon-carbon double bonds (e.g., 1, 2, 3, or 4 double bonds) (“C₂-C₁₀ alkenyl”). In some embodiments, an alkenyl group has 2 to 9 carbon atoms (“C₂-C₉ alkenyl”). In some embodiments, an alkenyl group has 2 to 8 carbon atoms (“C₂-C₈ alkenyl”). In some embodiments, an alkenyl group has 2 to 7 carbon atoms (“C₂-C₇ alkenyl”). In some embodiments, an alkenyl group has 2 to 6 carbon atoms (“C₂-C₆ alkenyl”). In some embodiments, an alkenyl group has 2 to 5 carbon atoms (“C₂-C₅ alkenyl”). In some embodiments, an alkenyl group has 2 to 4 carbon atoms (“C₂-C₄ alkenyl”). In some embodiments, an alkenyl group has 2 to 3 carbon atoms (“C₂-C₃ alkenyl”). In some embodiments, an alkenyl group has 2 carbon atoms (“C₂ alkenyl”). The one or more carbon-carbon double bonds can be internal (such as in 2-butenyl) or terminal (such as in 1-butenyl). Examples of C₂-C₄ alkenyl groups include, without limitation, ethenyl (C₂), 1-propenyl (C₃), 2-propenyl (C₃), 1-butenyl (C₄), 2-butenyl (C₄), butadienyl (C₄), and the like. Examples of C₂-C₆ alkenyl groups include the aforementioned C₂-C₄ alkenyl groups as well as pentenyl (C₅), pentadienyl (C₅), hexenyl (C₆), and the like. Additional examples of alkenyl include heptenyl (C₇), octenyl (C₈), octatrienyl (C₈), and the like. Unless otherwise specified, each instance of an alkenyl group is independently unsubstituted (an “unsubstituted alkenyl”) or substituted (a “substituted alkenyl”) with one or more substituents. In certain embodiments, the alkenyl group is an unsubstituted C₂-C₁₀ alkenyl. In certain embodiments, the alkenyl group is a substituted C₂-C₁₀ alkenyl.

[0675] Alkynyl: As used herein, “alkynyl” refers to a radical of any hydrocarbon chain of either linear or branched configuration, having one or more carbon-carbon triple bonds occurring in any stable point along the chain, e.g., “C₂-C₁₀ alkynyl”, refers to an alkynyl group having 2-10 carbons. Examples of an alkynyl group include prop-2-ynyl, but-2-ynyl, but-3-ynyl, pent-2-ynyl, 3-methylpent-4-ynyl, hex-2-ynyl, hex-5-ynyl, etc. In embodiments, an alkynyl comprises one carbon-carbon triple bond. An alkynyl group may be unsubstituted or substituted with one or more substituent groups as described herein. For example, an alkynyl group may be substituted with one or more (e.g., 1, 2, 3, 4, 5, or 6 independently selected substituents) of halogen, —COR^{aa}, —CO₂H, —CONH₂, —CO₂R″, —CN, —OH, —OR^{aa}, —OCOR^{aa}, —OCO₂R″, —NH₂, —NHR″, —N(R^{aa})₂, —SR″ or —SO₂R″, wherein each instance of R″ independently is C₁-C₁₀ aliphatic (e.g., C₁-C₁₀ alkyl, C₁-C₈ alkyl, C₁-C₆ alkyl, or C₁-C₃ alkyl). In embodiments, R″ independently is an unsubstituted alkyl (e.g., unsubstituted C₁-C₁₀ alkyl, C₁-C₈ alkyl, C₁-C₆ alkyl, or C₁-C₃ alkyl). In embodiments, R″ independently is unsubstituted C₁-C₃ alkyl. In embodiments, the alkynyl is unsubstituted. In embodiments, the alkynyl is substituted (e.g., with 1, 2, 3, 4, 5, or 6 substituent groups as described herein).

[0676] For example, “alkynyl” refers to a radical of a straight-chain or branched hydrocarbon group having from 2 to 10 carbon atoms and one or more carbon-carbon triple bonds (e.g., 1, 2, 3, or 4 triple bonds) and optionally one or more double bonds (e.g., 1, 2, 3, or 4 double bonds) (“C₂-C₁₀ alkynyl”). An alkynyl group that has one or more triple bonds and one or more double bonds is also referred to as an “ene-yne”. In some embodiments, an alkynyl group has 2 to 9 carbon atoms (“C₂-C₉ alkynyl”). In some embodiments, an alkynyl group has 2 to 8 carbon atoms (“C₂-C₈ alkynyl”). In some embodiments, an alkynyl group has 2 to 7 carbon atoms (“C₂-C₇ alkynyl”). In some embodiments, an alkynyl group has 2 to 6 carbon atoms (“C₂-C₆ alkynyl”). In some embodiments, an alkynyl group has 2 to 5 carbon atoms (“C₂-C₅ alkynyl”). In some embodiments, an alkynyl group has 2 to 4 carbon atoms (“C₂-C₄ alkynyl”). In some embodiments, an alkynyl group has 2 to 3 carbon atoms (“C₂-C₃ alkynyl”). In some embodiments, an alkynyl group has 2 carbon atoms (“C₂ alkynyl”). The one or more carbon-- triple bonds can be internal (such as in 2-butynyl) or terminal (such as in 1-butynyl). Examples of C₂-C₄ alkynyl groups include, without limitation, ethynyl (C₂), 1-propynyl (C₃), 2-propynyl (C₃), 1-butynyl (C₄), 2-butynyl (C₄), and the like. Examples of C₂-C₆ alkenyl groups include the aforementioned C₂-C₄ alkynyl groups as well as pentynyl (C₅), hexynyl (C₆), and the like. Additional examples of alkynyl include heptynyl (C₇), octynyl (C₈), and the like. Unless otherwise specified, each instance of an alkynyl group is independently unsubstituted (an “unsubstituted alkynyl”) or substituted (a “substituted alkynyl”) with one or more substituents. In certain embodiments, the alkynyl group is an unsubstituted C₂-C₁₀ alkynyl. In certain embodiments, the alkynyl group is a substituted C₂-C₁₀ alkynyl.

[0677] Aryl: The term “aryl” used alone or as part of a larger moiety as in “aralkyl,” refers to a monocyclic, bicyclic, or tricyclic carbocyclic ring system having a total of six to fourteen ring members, wherein said ring system has a single point of attachment to the rest of the molecule, at least one ring in the system is aromatic and wherein each ring in the system contains 4 to 7 ring members. In embodiments, an aryl group has 6 ring carbon atoms (“C₆ aryl,” e.g., phenyl). In some embodiments, an aryl group has 10 ring carbon atoms (“C₁₀ aryl,” e.g., naphthyl such as 1-naphthyl and 2-naphthyl). In some embodiments, an aryl group has 14 ring carbon atoms (“C₁₄ aryl,” e.g., anthracyl). “Aryl” also includes ring systems wherein the aryl ring, as defined above, is fused with one or more carbocyclyl or heterocyclyl groups wherein the radical or point of attachment is on the aryl ring, and in such instances, the number of carbon atoms continue to designate the number of carbon atoms in the aryl ring system. Exemplary aryls include phenyl, naphthyl, and anthracene.

[0678] As used herein, “aryl” also refers to a radical of a monocyclic or polycyclic (e.g., bicyclic or tricyclic) 4n+2 aromatic ring system (e.g., having 6, 10, or 14 R electrons shared in a cyclic array) having 6-14 ring carbon atoms and zero heteroatoms provided in the aromatic ring system (“C₆-C₁₄ aryl”). In some embodiments, an aryl group has 6 ring carbon atoms (“C₆ aryl”; e.g., phenyl). In some embodiments, an aryl group has 10 ring carbon atoms (“C₁₀ aryl”; e.g., naphthyl such as 1-naphthyl and 2-naphthyl). In some embodiments, an aryl group has 14 ring carbon atoms (“C₁₄ aryl”; e.g., anthracyl). Unless otherwise specified, each instance of an aryl group is independently unsubstituted (an “unsubstituted aryl”) or substituted (a “substituted aryl”) with one or more substituents. In certain embodiments, the aryl group is an unsubstituted C₆-C₁₄ aryl. In certain embodiments, the aryl group is a substituted C₆-C₁₄ aryl.

[0679] Arylene: The term “arylene” as used herein refers to an aryl group that is divalent (that is, having two points of attachment to the molecule). Exemplary arylenes include phenylene (e.g., unsubstituted phenylene or substituted phenylene).

[0680] Carbocyclyl: As used herein, “carbocyclyl” or “carbocyclic” refers to a radical of a non-aromatic cyclic hydrocarbon group having from 3 to 10 ring carbon atoms (“C₃-C₁₀ carbocyclyl”) and zero heteroatoms in the non-aromatic ring system. In some embodiments, a carbocyclyl group has 3 to 8 ring carbon atoms (“C₃-C₈ carbocyclyl”). In some embodiments, a carbocyclyl group has 3 to 7 ring carbon atoms (“C₃-C₇ carbocyclyl”). In some embodiments, a carbocyclyl group has 3 to 6 ring carbon atoms (“C₃-C₆ carbocyclyl”). In some embodiments, a carbocyclyl group has 4 to 6 ring carbon atoms (“C₄-C₆ carbocyclyl”). In some embodiments, a carbocyclyl group has 5 to 6 ring carbon atoms (“C₅-C₆ carbocyclyl”). In some embodiments, a carbocyclyl group has 5 to 10 ring carbon atoms (“C₅-C₁₀ carbocyclyl”). Exemplary C₃-C₆ carbocyclyl groups include, without limitation, cyclopropyl (C₃), cyclopropenyl (C₃), cyclobutyl (C₄), cyclobutenyl (C₄), cyclopentyl (C₅), cyclopentenyl (C₅), cyclohexyl (C₆), cyclohexenyl (C₆), cyclohexadienyl (C₆), and the like. Exemplary C₃-C₈ carbocyclyl groups include, without limitation, the aforementioned C₃-C₆ carbocyclyl groups as well as cycloheptyl (C₇), cycloheptenyl (C₇), cycloheptadienyl (C₇), cycloheptatrienyl (C₇), cyclooctyl (C₈), cyclooctenyl (C₈), bicyclo[2.2.1]heptanyl (C₇), bicyclo[2.2.2]octanyl (C₈), and the like. Exemplary C₃-C₁₀ carbocyclyl groups include, without limitation, the aforementioned C₃-C₈ carbocyclyl groups as well as cyclononyl (C₉), cyclononenyl (C₉), cyclodecyl (C₁₀), cyclodecenyl (C₁₀), octahydro-1H-indenyl (C₉), decahydronaphthalenyl (C₁₀), spiro[4.5]decanyl (C₁₀), and the like. As the foregoing examples illustrate, in certain embodiments, the carbocyclyl group is either monocyclic (“monocyclic carbocyclyl”) or polycyclic (e.g., containing a fused, bridged or spiro ring system such as a bicyclic system (“bicyclic carbocyclyl”) or tricyclic system (“tricyclic carbocyclyl”)) and can be saturated or can contain one or more carbon-carbon double or triple bonds. “Carbocyclyl” also includes ring systems wherein the carbocyclyl ring, as defined above, is fused with one or more aryl or heteroaryl groups wherein the point of attachment is on the carbocyclyl ring, and in such instances, the number of carbons continue to designate the number of carbons in the carbocyclic ring system. Unless otherwise specified, each instance of a carbocyclyl group is independently unsubstituted (an “unsubstituted carbocyclyl”) or substituted (a “substituted carbocyclyl”) with one or more substituents. In certain embodiments, the carbocyclyl group is an unsubstituted C₃-C₁₀ carbocyclyl. In certain embodiments, the carbocyclyl group is a substituted C₃-C₁₀ carbocyclyl.

[0681] In some embodiments, “carbocyclyl” or “carbocyclic” is referred to as a “cycloalkyl”, i.e., a monocyclic, saturated carbocyclyl group having from 3 to 10 ring carbon atoms (“C₃-C₁0 cycloalkyl”). In some embodiments, a cycloalkyl group has 3 to 8 ring carbon atoms (“C₃-C₈ cycloalkyl”). In some embodiments, a cycloalkyl group has 3 to 6 ring carbon atoms (“C₃-C₆, cycloalkyl”). In some embodiments, a cycloalkyl group has 4 to 6 ring carbon atoms (“C₄-C₆ cycloalkyl”). In some embodiments, a cycloalkyl group has 5 to 6 ring carbon atoms (“C₅-C₆ cycloalkyl”). In some embodiments, a cycloalkyl group has 5 to 10 ring carbon atoms (“C₅-C₁₀ cycloalkyl”). Examples of C₅-C₆ cycloalkyl groups include cyclopentyl (C₅) and cyclohexyl (C₅). Examples of C₃-C₆ cycloalkyl groups include the aforementioned C₅-C₆ cycloalkyl groups as well as cyclopropyl (C₃) and cyclobutyl (C₄). Examples of C₃-C₈ cycloalkyl groups include the aforementioned C₃-C₆ cycloalkyl groups as well as cycloheptyl (C₇) and cyclooctyl (C₈). Unless otherwise specified, each instance of a cycloalkyl group is independently unsubstituted (an “unsubstituted cycloalkyl”) or substituted (a “substituted cycloalkyl”) with one or more substituents. In certain embodiments, the cycloalkyl group is an unsubstituted C₃-C₆ cycloalkyl. In certain embodiments, the cycloalkyl group is a substituted C₃-C₆ cycloalkyl.

[0682] Halogen: As used herein, the term “halogen” means fluorine, chlorine, bromine, or iodine.

[0683] Heteroalkyl: The term “heteroalkyl” refers to a radical of a branched or unbranched alkyl, alkenyl, or alkynyl group having carbon atoms in addition to heteroatoms independently selected from the group consisting of N, O, S, and P. For example, “heteroalkyl” can mean a branched or unbranched alkyl, alkenyl, or alkynyl group having from 1 to 8 carbon atoms in addition to 1, 2, 3 or 4 heteroatoms independently selected from the group consisting of N, O, S, and P. For example, the term “heteroalkyl” refers to a radical of a branched or unbranched alkyl, alkenyl, or alkynyl group having from 1 to 40 carbon atoms in addition to heteroatoms independently selected from the group consisting of N, O, S, and P (“C₁-C₄₀ heteroalkyl”). In an embodiment, the term “heteroalkyl” refers to a radical of a branched or unbranched alkyl group having from 1 to 40 carbon atoms in addition to heteroatoms independently selected from the group consisting of N, O, S, and P (“C₁-C₄₀ heteroalkyl”). In an embodiment, a “heteroalkyl” can comprise about 1 to about 7 heteroatoms, independently selected from the group consisting of N, O, S, and P, for every 10 carbons in the “heteroalkyl”. In an embodiment, a “heteroalkyl” can comprise about 1 to about 5 heteroatoms, independently selected from the group consisting of N, O, S, and P, for every 10 carbons in the “heteroalkyl”. In an embodiment, the heteroatoms are independently selected from the group consisting of N, O or S. In an embodiment, the heteroatoms are independently selected from the group consisting of N or O. Heteroalkyls include tertiary amines, secondary amines, ethers, thioethers, amides, thioamides, carbamates, thiocarbamates, hydrazones, imines, phosphodiesters, phosphoramidates, sulfonamides, and disulfides. A heteroalkyl group may optionally include monocyclic, bicyclic, or tricyclic rings, in which each ring desirably has three to eight members, for example a heteroalkyl group may optionally include one or more triazole ring(s). Examples of heteroalkyls include polyethers, such as methoxymethyl and ethoxyethyl, and hydrophilic polymers, such as polyethylene glycol (PEG).

[0684] Heteroalkylene: The term “heteroalkylene,” as used herein, represents a divalent form of a heteroalkyl group as described herein.

[0685] Heteroaryl: The term “heteroaryl,” as used herein, is fully unsaturated heteroatom-containing ring wherein at least one ring atom is a heteroatom such as, but not limited to, nitrogen and oxygen.

[0686] As used herein, “heteroaryl” also refers to a radical of a 5-14 membered monocyclic or polycyclic (e.g., bicyclic or tricyclic) 4n+2 aromatic ring system (e.g., having 6, 10, or 14 πL electrons shared in a cyclic array) having ring carbon atoms and 1 or more (e.g., 1, 2, 3, or 4 ring heteroatoms) ring heteroatoms provided in the aromatic ring system, wherein each heteroatom is independently selected from oxygen, sulfur, nitrogen, boron, silicon, and phosphorus (“5-14 membered heteroaryl”). In heteroaryl groups that contain one or more nitrogen atoms, the point of attachment can be a carbon or nitrogen atom, as valency permits. Heteroaryl polycyclic ring systems can include one or more heteroatoms in one or both rings. “Heteroaryl” includes ring systems wherein the heteroaryl ring, as defined above, is fused with one or more carbocyclyl or heterocyclyl groups wherein the point of attachment is on the heteroaryl ring, and in such instances, the number of ring members continue to designate the number of ring members in the heteroaryl ring system. “Heteroaryl” also includes ring systems wherein the heteroaryl ring, as defined above, is fused with one or more aryl groups wherein the point of attachment is either on the aryl or heteroaryl ring, and in such instances, the number of ring members designates the number of ring members in the fused polycyclic (aryl/heteroaryl) ring system. Polycyclic heteroaryl groups wherein one ring does not contain a heteroatom (e.g., indolyl, quinolinyl, carbazolyl, and the like) the point of attachment can be on either ring, i.e., either the ring bearing a heteroatom (e.g., 2-indolyl) or the ring that does not contain a heteroatom (e.g., 5-indolyl).

[0687] In some embodiments, a heteroaryl group is a 5-10 membered aromatic ring system having ring carbon atoms and 1 or more (e.g., 1, 2, 3, or 4) ring heteroatoms provided in the aromatic ring system, wherein each heteroatom is independently selected from oxygen, sulfur, nitrogen, boron, silicon, and phosphorus (“5-10 membered heteroaryl”). In some embodiments, a heteroaryl group is a 5-8 membered aromatic ring system having ring carbon atoms and 1 or more (e.g., 1, 2, 3, or 4) ring heteroatoms provided in the aromatic ring system, wherein each heteroatom is independently selected from oxygen, sulfur, nitrogen, boron, silicon, and phosphorus (“5-8 membered heteroaryl”). In some embodiments, a heteroaryl group is a 5-6 membered aromatic ring system having ring carbon atoms and 1 or more (e.g., 1, 2, 3, or 4) ring heteroatoms provided in the aromatic ring system, wherein each heteroatom is independently selected from oxygen, sulfur, nitrogen, boron, silicon, and phosphorus (“5-6 membered heteroaryl”). In some embodiments, the 5-6 membered heteroaryl has 1 or more (e.g., 1, 2, or 3) ring heteroatoms selected from oxygen, sulfur, nitrogen, boron, silicon, and phosphorus. In some embodiments, the 5-6 membered heteroaryl has 1 or 2 ring heteroatoms selected from oxygen, sulfur, nitrogen, boron, silicon, and phosphorus. In some embodiments, the 5-6 membered heteroaryl has 1 ring heteroatom selected from oxygen, sulfur, nitrogen, boron, silicon, and phosphorus. Unless otherwise specified, each instance of a heteroaryl group is independently unsubstituted (an “unsubstituted heteroaryl”) or substituted (a “substituted heteroaryl”) with one or more substituents. In certain embodiments, the heteroaryl group is an unsubstituted 5-14 membered heteroaryl. In certain embodiments, the heteroaryl group is a substituted 5-14 membered heteroaryl.

[0688] Exemplary 5-membered heteroaryl groups containing 1 heteroatom include, without limitation, pyrrolyl, furanyl and thiophenyl. Exemplary 5-membered heteroaryl groups containing 2 heteroatoms include, without limitation, imidazolyl, pyrazolyl, oxazolyl, isoxazolyl, thiazolyl, and isothiazolyl. Exemplary 5-membered heteroaryl groups containing 3 heteroatoms include, without limitation, triazolyl, oxadiazolyl, and thiadiazolyl. Exemplary 5-membered heteroaryl groups containing 4 heteroatoms include, without limitation, tetrazolyl. Exemplary 6-membered heteroaryl groups containing 1 heteroatom include, without limitation, pyridinyl. Exemplary 6-membered heteroaryl groups containing 2 heteroatoms include, without limitation, pyridazinyl, pyrimidinyl, and pyrazinyl. Exemplary 6-membered heteroaryl groups containing 3 or 4 heteroatoms include, without limitation, triazinyl and tetrazinyl, respectively. Exemplary 7-membered heteroaryl groups containing 1 heteroatom include, without limitation, azepinyl, oxepinyl, and thiepinyl. Exemplary 5,6-bicyclic heteroaryl groups include, without limitation, indolyl, isoindolyl, indazolyl, benzotriazolyl, benzothiophenyl, isobenzothiophenyl, benzofuranyl, benzoisofuranyl, benzimidazolyl, benzoxazolyl, benzisoxazolyl, benzoxadiazolyl, benzthiazolyl, benzisothiazolyl, benzthiadiazolyl, indolizinyl, and purinyl. Exemplary 6,6-bicyclic heteroaryl groups include, without limitation, naphthyridinyl, pteridinyl, quinolinyl, isoquinolinyl, cinnolinyl, quinoxalinyl, phthalazinyl, and quinazolinyl. Exemplary tricyclic heteroaryl groups include, without limitation, phenanthridinyl, dibenzofuranyl, carbazolyl, acridinyl, phenothiazinyl, phenoxazinyl and phenazinyl.

[0689] As used herein, “heterocyclyl” or “heterocyclic” refers to a radical of a 3- to 14-membered non-aromatic ring system having ring carbon atoms and 1 or more (e.g., 1, 2, 3, or 4) ring heteroatoms, wherein each heteroatom is independently selected from oxygen, sulfur, nitrogen, boron, silicon, and phosphorus (“3-14 membered heterocyclyl”). In heterocyclyl groups that contain one or more nitrogen atoms, the point of attachment can be a carbon or nitrogen atom, as valency permits. A heterocyclyl group can either be monocyclic (“monocyclic heterocyclyl”) or polycyclic (e.g., a fused, bridged or spiro ring system such as a bicyclic system (“bicyclic heterocyclyl”) or tricyclic system (“tricyclic heterocyclyl”)). and can be saturated or can contain one or more carbon-carbon double or triple bonds.

[0690] Heterocyclyl polycyclic ring systems can include one or more heteroatoms in one or both rings. “Heterocyclyl” also includes ring systems wherein the heterocyclyl ring, as defined above, is fused with one or more carbocyclyl groups wherein the point of attachment is either on the carbocyclyl or heterocyclyl ring, or ring systems wherein the heterocyclyl ring, as defined above, is fused with one or more aryl or heteroaryl groups, wherein the point of attachment is on the heterocyclyl ring, and in such instances, the number of ring members continue to designate the number of ring members in the heterocyclyl ring system. Unless otherwise specified, each instance of heterocyclyl is independently unsubstituted (an “unsubstituted heterocyclyl”) or substituted (a “substituted heterocyclyl”) with one or more substituents. In certain embodiments, the heterocyclyl group is an unsubstituted 3-14 membered heterocyclyl. In certain embodiments, the heterocyclyl group is a substituted 3-14 membered heterocyclyl.

[0691] In some embodiments, a heterocyclyl group is a 5-10 membered non-aromatic ring system having ring carbon atoms and 1 or more (e.g., 1, 2, 3, or 4) ring heteroatoms, wherein each heteroatom is independently selected from oxygen, sulfur, nitrogen, boron, silicon, and phosphorus (“5-10 membered heterocyclyl”). In some embodiments, a heterocyclyl group is a 5-8 membered non-aromatic ring system having ring carbon atoms and 1 or more (e.g., 1, 2, 3, or 4) ring heteroatoms, wherein each heteroatom is independently selected from oxygen, sulfur, nitrogen, boron, silicon, and phosphorus (“5-8 membered heterocyclyl”). In some embodiments, a heterocyclyl group is a 5-6 membered non-aromatic ring system having ring carbon atoms and 1 or more (e.g., 1, 2, 3, or 4) ring heteroatoms, wherein each heteroatom is independently selected from oxygen, sulfur, nitrogen, boron, silicon, and phosphorus (“5-6 membered heterocyclyl”). In some embodiments, the 5-6 membered heterocyclyl has 1 or more (e.g., 1, 2, or 3) ring heteroatoms selected from oxygen, sulfur, nitrogen, boron, silicon, and phosphorus. In some embodiments, the 5-6 membered heterocyclyl has 1 or 2 ring heteroatoms selected from oxygen, sulfur, nitrogen, boron, silicon, and phosphorus. In some embodiments, the 5-6 membered heterocyclyl has 1 ring heteroatom selected from oxygen, sulfur, nitrogen, boron, silicon, and phosphorus.

[0692] Exemplary 3-membered heterocyclyl groups containing 1 heteroatom include, without limitation, azirdinyl, oxiranyl, thiorenyl. Exemplary 4-membered heterocyclyl groups containing 1 heteroatom include, without limitation, azetidinyl, oxetanyl and thietanyl.

[0693] Exemplary 5-membered heterocyclyl groups containing 1 heteroatom include, without limitation. tetrahydrofuranyl, dihydrofuranyl, tetrahydrothiophenyl, dihydrothiophenyl, pyrrolidinyl, dihydropyrrolyl and pyrrolyl-2,5-dione. Exemplary 5- membered heterocyclyl groups containing 2 heteroatoms include, without limitation, dioxolanyl, oxathiolanyl and dithiolanyl. Exemplary 5-membered heterocyclyl groups containing 3 heteroatoms include, without limitation, triazolinyl, oxadiazolinyl, and thiadiazolinyl. Exemplary 6-membered heterocyclyl groups containing 1 heteroatom include, without limitation, piperidinyl, tetrahydropyranyl, dihydropyridinyl, and thianyl. Exemplary 6-membered heterocyclyl groups containing 2 heteroatoms include, without limitation, piperazinyl, morpholinyl, dithianyl, dioxanyl. Exemplary 6-membered heterocyclyl groups containing 2 heteroatoms include, without limitation, triazinanyl. Exemplary 7-membered heterocyclyl groups containing 1 heteroatom include, without limitation, azepanyl, oxepanyl and thiepanyl. Exemplary 8-membered heterocyclyl groups containing 1 heteroatom include, without limitation, azocanyl, oxecanyl and thiocanyl. Exemplary bicyclic heterocyclyl groups include, without limitation, indolinyl, isoindolinyl, dihydrobenzofuranyl, dihydrobenzothienyl, tetrahydrobenzothienyl, tetrahydrobenzofuranyl, tetrahydroindolyl, tetrahydroquinolinyl, tetrahydroisoquinolinyl, decahydroquinolinyl, decahydroisoquinolinyl, octahydrochromenyl, octahydroisochromenyl, decahydronaphthyridinyl, decahydro-1,8-naphthyridinyl, octahydropyrrolo[3,2-b]pyrrole, indolinyl, phthalimidyl, naphthalimidyl, chromanyl, chromenyl, 1H-benzo[e][1,4]diazepinyl, 1,4,5,7-tetrahydropyrano[3,4-b]pyrrolyl, 5,6-dihydro-4H-furo[3,2-b]pyrrolyl, 6,7-dihydro-5H-furo[3,2-b]pyranyl, 5,7-dihydro-4H-thieno[2,3-c]pyranyl, 2,3-dihydro-1H-pyrrolo[2,3-b]pyridinyl, 2,3-dihydrofuro[2,3-b]pyridinyl, 4,5,6,7-tetrahydro-1H-pyrrolo-[2,3-b]pyridinyl, 4,5,6,7-tetrahydrofuro[3,2-c]pyridinyl, 4,5,6,7-tetrahydrothieno [3,2- b]pyridinyl, 1,2,3,4-tetrahydro-1,6-naphthyridinyl, and the like.

[0694] Heterocycloalkyl: The term “heterocycloalkyl,” as used herein, is a non-aromatic ring wherein at least one atom is a heteroatom such as, but not limited to, nitrogen, oxygen, sulfur, or phosphorus, and the remaining atoms are carbon. In some embodiments, a heterocycloalkyl group has from 3 to 10 ring carbon atoms (“C₃-C₁₀ heterocycloalkyl”). In some embodiments, a heterocycloalkyl group has 3 to 8 ring carbon atoms (“C₃-C₈ heterocycloalkyl”). In some embodiments, a heterocycloalkyl group has 3 to 6 ring carbon atoms (“C₃-C₆, heterocycloalkyl”). In some embodiments, a heterocycloalkyl group has 4 to 6 ring carbon atoms (“C₄-C₆ heterocycloalkyl”). In some embodiments, a heterocycloalkyl group has 5 to 6 ring carbon atoms (“C₅-C₆ heterocycloalkyl”). In some embodiments, a heterocycloalkyl group has 5 to 10 ring carbon atoms (“C₅-C₁₀ heterocycloalkyl”). Examples of C₃-C₆ heterocycloalkyl groups include tetrahydropyranyl (C₅) and piperazinyl (C₄). Unless otherwise specified, each instance of a heterocycloalkyl group is independently unsubstituted (an “unsubstituted heterocycloalkyl”) or substituted (a “substituted heterocycloalkyl”) with one or more substituents. In certain embodiments, the heterocycloalkyl group is an unsubstituted C₃-C₆ heterocycloalkyl. In certain embodiments, the heterocycloalkyl group is a substituted C₃-C₆ heterocycloalkyl.

[0695] As understood from the above, alkyl, heteroalkyl, alkenyl, alkynyl, acyl, carbocyclyl, cycloalkyl, heterocyclyl, heterocycloalkyl, aryl, and heteroaryl groups, as defined herein, are, in certain embodiments, optionally substituted. Optionally substituted refers to a group which may be substituted or unsubstituted (e.g., “substituted” or “unsubstituted” alkyl, “substituted” or “unsubstituted” alkenyl, “substituted” or “unsubstituted” alkynyl, “substituted” or “unsubstituted” heteroalkyl, “substituted” or “unsubstituted” heteroalkenyl, “substituted” or ‘unsubstituted” heteroalkynyl, “substituted” or “unsubstituted” carbocyclyl, “substituted” or “unsubstituted” cycloalkyl, “substituted” or “unsubstituted” heterocyclyl, “substituted” or “unsubstituted” heterocycloalkyl, “substituted” or “unsubstituted” aryl or “substituted” or “unsubstituted” heteroaryl group. In general, the term “substituted” means that at least one hydrogen present on a group is replaced with a permissible substituent, e.g., a substituent which upon substitution results in a stable compound, e.g., a compound which does not spontaneously undergo transformation such as by rearrangement, cyclization, elimination, or other reaction. Unless otherwise indicated, a “substituted” group has a substituent at one or more substitutable positions of the group, and when more than one position in any given structure is substituted, the substituent is either the same or different at each position. The term “substituted” is contemplated to include substitution with all permissible substituents of organic compounds, any of the substituents described herein that results in the formation of a stable compound. The present invention contemplates any and all such combinations in order to arrive at a stable compound. For purposes of this invention, heteroatoms such as nitrogen may have hydrogen substituents and/or any suitable substituent as described herein which satisfy the valencies of the heteroatoms and results in the formation of a stable moiety.

[0696] Exemplary carbon atom substituents include, but are not limited to, halogen, —CN, —NO₂, —N₃, —SO₂, —SO₃H, —OH, —OR^{aa}, —ON(R^{bb})₂, —N(R^{bb})₂, —N(R^{bb})₃+X, —N(OR^{cc})R^{bb}, —SeH, —SeR^{aa}, —SH, —SR^{aa}, —SSR^{cc}, —C(═O)R^{aa}, —CO₂H, —CHO, —C(OR^{cc})₂, —CO₂R^{aa}, —OC(═O)R^{aa}, —OCO₂R^{aa}, —C(═O)N(R^{bb})₂, —OC(═O)N(R^{bb})₂, —NR^{bb}C(═O)R^{aa}, —NR^{bb}CO₂R^{aa}, —NR^{bb}C(═O)N(R^{bb})₂, —C(═NR^{bb})R^{aa}, —C(═NR^{bb})OR^{aa}, —OC(═NR^{bb})R^{aa}, —OC(═NR^{bb})OR^{aa}, —C(═NR^{bb})N(R^{bb})₂, —OC(═NR^{bb})N(R^{bb})₂, —NR^{bb}C(═NR^{bb})N(R^{bb})₂, —C(═O)NR^{bb}SO₂R^{aa}, —NR^{bb}SO₂R^{aa}, —SO₂N(R^{bb})₂, —SO₂R^{aa}, —SO₂OR^{aa}, —OSO₂R^{aa}—S(═O)R^{aa}, —OS(═O)R^{aa}, —Si(R^{aa})₃—OSi(R^{aa})₃—C(═S)N(R^{bb})₂, —C(═O)SR^{aa}, —C(═S)SR^{aa}, —SC(═S)SR^{aa}, —SC(═O)SR^{aa}, —OC(═O)SR^{aa}, —SC(═O)OR^{aa}, —SC(═O)R^{aa}, —P(═O)₂R^{aa}, —OP(═O)₂R^{aa}, —P(═O)(R^{aa})₂, —OP(═O)(R^{aa})₂, —OP(═O)(OR^{cc})₂, —P(═O)₂N(R^{bb})₂, —OP(═O)₂N(R^{bb})₂, - P(═O)(NR^{bb})₂, —OP(═O)(NR^{bb})₂, —NR^{bb}P(═O)(OR^{cc})₂, —NR^{bb}P(═O)(NR^{bb})₂, —P(R^{cc})₂, - P(R^{cc})₃, —OP(R^{cc})₂, —OP(R^{cc})₃, —B(R^{aa})₂, —B(OR^{cc})₂, —BR^{aa}(OR^{cc}), C₁-C₁₀ alkyl, C₂-C₁₀ alkenyl, C₂-C₁₀ alkynyl, C₃-C₁₄ carbocyclyl, 3-14 membered heterocyclyl, C₆-C₁₄ aryl, and 5-14 membered heteroaryl, wherein each alkyl, alkenyl, alkynyl, carbocyclyl, heterocyclyl, aryl, and heteroaryl is independently substituted with 0, 1, 2, 3, 4, or 5 R^{dd} groups;
[0697] or two geminal hydrogens on a carbon atom are replaced with the group ═O, ═S, ═NN(R^{bb})₂, ═NNR^{bb}C(═O)R—, ═NNR^{bb}C(═O)OR^{aa}, ═NNR^{bb}S(═O)₂R^{aa}, ═NR^{bb}, or ═NOR^{cc}; each instance of R^{aa} is, independently, selected from C₁-C₁₀ alkyl, C₂-C₁₀ alkenyl, C₂-C₁₀ alkynyl, C₃-C₁₀ carbocyclyl, 3-14 membered heterocyclyl, C₆-C₁₄ aryl, and 5-14 membered heteroaryl, or two R^{aa} groups are joined to form a 3-14 membered heterocyclyl or 5-14 membered heteroaryl ring, wherein each alkyl, alkenyl, alkynyl, carbocyclyl, heterocyclyl, aryl, and heteroaryl is independently substituted with 0, 1, 2, 3, 4, or 5 R^{dd}groups;
[0698] each instance of R^{bb} is, independently, selected from hydrogen, —OH, —OR^{aa}, - N(R^{cc})₂, —CN, —C(═O)R^{aa}, —C(═O)N(R^{cc})₂, —CO₂R^{aa}, —SO₂R^{aa}, —C(═NR^{cc})OR^{aa}, - C(═NR^{cc})N(R^{cc})₂, —SO₂N(R^{cc})₂, —SO₂R^{cc}, —SO₂OR^{cc}, —SOR^{aa}, —C(═S)N(R^{cc})₂, —C(═O)SR^{cc}, - C(═S)SR^{cc}, —P(═O)₂R^{aa}, —P(═O)(R^{aa})₂, —P(═O)₂N(R^{cc})₂, —P(═O)(NR^{cc})₂, C₁-C₁₀ alkyl, C₂-C₁₀ alkenyl, C₂-C₁₀ alkynyl, C₃-C₁₀ carbocyclyl, 3-14 membered heterocyclyl, C₆-C₁₄ aryl, and 5-14 membered heteroaryl, or two R^{bb} groups, together with the heteroatom to which they are attached, form a 3-14 membered heterocyclyl or 5-14 membered heteroaryl ring, wherein each alkyl, alkenyl, alkynyl, carbocyclyl, heterocyclyl, aryl, and heteroaryl is independently substituted with 0, 1, 2, 3, 4, or 5 R^{dd} groups;
[0699] each instance of R^{cc} is, independently, selected from hydrogen, C₁-C₁₀ alkyl, C₂-C₁₀ alkenyl, C₂-C₁₀ alkynyl, C₃-C₁₀ carbocyclyl, 3-14 membered heterocyclyl, C₆-C₁₄ aryl, and 5-14 membered heteroaryl, or two R^{cc} groups, together with the heteroatom to which they are attached, form a 3-14 membered heterocyclyl or 5-14 membered heteroaryl ring, wherein each alkyl, alkenyl, alkynyl, carbocyclyl, heterocyclyl, aryl, and heteroaryl is independently substituted with 0, 1, 2, 3, 4, or 5 R^{dd} groups;
[0700] each instance of R^{dd} is, independently, selected from halogen, —CN, —NO₂, —N₃, —SO₂H, —SO₃H, —OH, —OR^{ee}, —ON(R^{ff})₂, —N(R^{ff})₂, —N(R^{ff})₃+X⁻, —N(OR^{ee})R^{ee}, —SH, —SR^{ee}, —SSR^{ee}, —C(═O)R^{ee}, —CO₂H, —CO₂R^{ee}, —OC(═O)R^{ee}, —OCO₂R^{ee}, —C(═O)N(R^{ff})₂, - OC(═O)N(R^{ff})₂, —NR^{ff}C(═O)R^{ee}, —NR^{ff}CO₂R^{ee}, —NR^{ff}C(═O)N(R^{ff})₂, —C(═NR^{ff})OR^{ee}, - OC(═NR^{ff})R^{ee}, —OC(═NR^{ff})OR^{ee}, —C(═NR^{ff})N(R^{ff})₂, —OC(═NR^{ff})N(R^{ff})₂, —NR^{ff}C(═NR^{ff})N(R^{ff})₂, —NR^{ff}SO₂R^{ee}, —SO₂N(R^{ff})₂, —SO₂R^{ee}, —SO₂OR^{ee}, —OSO₂R^{ee}, —S(═O)R^{ee}, —Si(R^{ee})₃, —OSi(R^{ee})₃, —C(═S)N(R^{ff})₂, —C(═O)SR^{ee}, —C(═S)SR^{ee}, —SC(═S)SR^{ee}, —P(═O)₂R^{ee}, - P(═O)(R^{ee})₂—OP(═O)(R^{ee})₂, —OP(═O)(OR^{ee})₂, C₁-C₁₀ alkyl, C₂-C₁₀ alkenyl, C₂-C₁₀ alkynyl, C₃-C₁₀ carbocyclyl, 3-10 membered heterocyclyl, C₆-C₁₀ aryl, 5-10 membered heteroaryl, wherein each alkyl, alkenyl, alkynyl, carbocyclyl, heterocyclyl, aryl, and heteroaryl is independently substituted with 0, 1, 2, 3, 4, or 5 R^{gg} groups, or two geminal R^{dd} substituents can be joined to form ═O or ═S;
[0701] each instance of R^{ee} is, independently, selected from C₁-C₁₀ alkyl, C₂-C₁₀ alkenyl, C₂-C₁₀ alkynyl, C₃-C₁₀ carbocyclyl, C₆-C₁₀ aryl, 3-10 membered heterocyclyl, and 3-10 membered heteroaryl, wherein each alkyl, alkenyl, alkynyl, carbocyclyl, heterocyclyl, aryl, and heteroaryl is independently substituted with 0, 1, 2, 3, 4, or 5 R^{gg} groups;
[0702] each instance of R^{ff} is, independently, selected from hydrogen, C₁-C₁₀ alkyl, C₂-C₁₀ alkenyl, C₂-C₁₀ alkynyl, C₃-C₁₀ carbocyclyl, 3-10 membered heterocyclyl, C₆-C₁₀ aryl and 5-10 membered heteroaryl, or two R^{f} groups, together with the heteroatom to which they are attached, form a 3-14 membered heterocyclyl or 5-14 membered heteroaryl ring, wherein each alkyl, alkenyl, alkynyl, carbocyclyl, heterocyclyl, aryl, and heteroaryl is independently substituted with 0, 1, 2, 3, 4, or 5 R^{gg} groups; and
[0703] each instance of R^{gg} is, independently, halogen, —CN, —NO₂, —N₃, —SO₂H, —SO₃H, —OH, —OC₁-C₁₀ alkyl, —ON(C₁-C₁₀ alkyl)₂, —N(C₁-C₁₀ alkyl)₂, —N(C₁-C₁₀ alkyl)₃+X⁻, —NH(C₁-C₁₀ alkyl)₂+X⁻, —NH₂(C₁-C₁₀ alkyl)+X⁻, —NH₃+X⁻, —N(OC₁-C₁₀ alkyl)(C₁-C₁₀ alkyl), —N(OH)(C₁-C₁₀ alkyl), —NH(OH), —SH, —S, C₁-C₁₀ alkyl, —SS(C₁-C₁₀ alkyl), —C(═O)(C₁-C₁0 alkyl), —CO₂H, —CO₂(C₁-C₁₀ alkyl), —OC(═O)(C₁-C₁₀ alkyl), —OCO₂(C₁-C₁₀ alkyl), —C(═O)NH₂, —C(═O)N(C₁-C₁₀ alkyl)₂, —OC(═O)NH(C₁-C₁₀ alkyl), —NHC(═O)(C₁-C₁₀ alkyl), —N(C₁-C₁₀ alkyl)C(═O)(C₁-C₁₀ alkyl), —NHCO₂(C₁-C₁₀ alkyl), —NHC(═O)N(C₁-C₁₀ alkyl)₂, —NHC(═O)NH(C₁-C₁₀ alkyl), —NHC(═O)NH₂, —C(═NH)O(C₁-C₁₀ alkyl), —OC(═NH)(C₁-C₁₀ alkyl), —OC(═NH)OC₁-C₁₀ alkyl, - C(═NH)N(C₁-C₁₀ alkyl)₂, —C(═NH)NH(C₁-C₁₀ alkyl), —C(═NH)NH₂, —OC(═NH)N(C₁-C₁₀alkyl)₂, —OC(NH)NH(C₁-C₁₀ alkyl), —OC(NH)NH₂, —NHC(NH)N(C₁-C₁₀ alkyl)₂, —NHC(═NH)NH₂, —NHSO₂(C₁-C₁₀ alkyl), —SO₂N(C₁-C₁₀ alkyl)₂, —SO₂NH(C₁-C₁₀ alkyl), —SO₂NH₂, —SO₂(C₁-C₁₀ alkyl), —SO₂(C₁-C₁₀ alkyl), —OSO₂(C₁-C₆ alkyl), —SO(C₁-C₆ alkyl), —Si(C₁-C₁₀ alkyl)₃, —OSi(C₁-C₆ alkyl)₃, —C(═S)N(C₁-C₁₀ alkyl)₂, C(═S)NH(C₁-C₁₀ alkyl), C(═S)NH₂, —C(═O)S(C₁-C₆ alkyl), —C(═S)S(C₁-C₆ alkyl), —SC(═S)S(C₁-C₆ alkyl), —P(═O)₂(C₁-C₁₀ alkyl), —P(═O)(C₁-C₁₀ alkyl)₂, —OP(═O)(C₁-C₁₀ alkyl)₂, —OP(═O)(OC₁-C₁₀ alkyl)₂, C₁-C₁₀ alkyl, C₂-C₁₀ alkenyl, C₂-C₁₀ alkynyl, C₃-C₁₀ carbocyclyl, C₆-C₁₀ aryl, 3-10 membered heterocyclyl, 5-10 membered heteroaryl; or two geminal R⁹⁹ substituents can be joined to form ═O or ═S; wherein X—is a counterion.

[0704] As used herein, the term “halo” or “halogen” refers to fluorine (fluoro, —F), chlorine (chloro, —C₁), bromine (bromo, —Br), or iodine (iodo, —I).

[0705] As used herein, a “counterion” is a negatively charged group associated with a positively charged quarternary amine in order to maintain electronic neutrality. Exemplary counterions include halide ions (e.g., F⁻, C₁⁻, Br⁻, I⁻), NO₃⁻, ClO₄⁻, OH⁻, H₂PO₄⁻, HSO₄⁻, sulfonate ions (e.g., methansulfonate, trifluoromethanesulfonate, p-toluenesulfonate, benzenesulfonate, 10-camphor sulfonate, naphthalene-2-sulfonate, naphthalene-1-sulfonic acid-5-sulfonate, ethan-1-sulfonic acid-2-sulfonate, and the like), and carboxylate ions (e.g., acetate, ethanoate, propanoate, benzoate, glycerate, lactate, tartrate, glycolate, and the like).

[0706] Nitrogen atoms can be substituted or unsubstituted as valency permits, and include primary, secondary, tertiary, and quarternary nitrogen atoms. Exemplary nitrogen atom substitutents include, but are not limited to, hydrogen, —OH, —OR^{aa}, —N(R^{cc})₂, —CN, —C(═O)R^{aa}, —C(═O)N(R^{cc})₂, —CO₂R^{aa}, —SO₂R^{aa}, —C(═NR^{bb})R^{aa}, —C(═NR^{o})OR^{aa}, —C(═NR^{cc})N(R^{cc})₂, —SO₂N(R^{cc})₂, —SO₂R^{cc}, —SO₂OR^{cc}, —SOR^{aa}, —C(═S)N(R^{cc})₂, —C(═O)SR^{cc}, —C(═S)SR^{cc}, —CH₂(CO₂H), —P(═O)₂R^{aa}, —P(═O)(R^{aa})₂, —P(═O)₂N(R^{cc})₂, —P(═O)(NR^{cc})₂, C₁-C₁₀ alkyl, C₂-C₁₀ alkenyl, C₂-C₁₀ alkynyl, C₃-C₁₀ carbocyclyl, 3-14 membered heterocyclyl, C₆-C₁₄ aryl, and 5-14 membered heteroaryl, or two R^{cc} groups, together with the N atom to which they are attached, form a 3-14 membered heterocyclyl or 5-14 membered heteroaryl ring, wherein each alkyl, alkenyl, alkynyl, carbocyclyl, heterocyclyl, aryl, and heteroaryl is independently substituted with 0, 1, 2, 3, 4, or 5 R^{dd} groups, and wherein R^{aa}, R^{bb}, R^{cc} and R^{dd} are as defined above.

[0707] In certain embodiments, the substituent present on a nitrogen atom is a nitrogen protecting group (also referred to as an amino protecting group). Nitrogen protecting groups are well known in the art and include those described in detail in Protecting Groups in Organic Synthesis, T. W. Greene and P. G. M. Wuts, 3rd edition, John Wiley & Sons, 1999, incorporated herein by reference

[0708] For example, nitrogen protecting groups such as amide groups (e.g., —C(═O)R^{aa}) include, but are not limited to, formamide, acetamide, chloroacetamide, trichloroacetamide, trifluoroacetamide, phenylacetamide, 3-phenylpropanamide, picolinamide, 3-pyridylcarboxamide, N-benzoylphenylalanyl derivative, benzamide, p-phenylbenzamide, o-nitophenylacetamide, o-nitrophenoxyacetamide, acetoacetamide, (N′-dithiobenzyloxyacylamino)acetamide, 3-(p-hydroxyphenyl)propanamide, 3-(o-nitrophenyl)propanamide, 2-methyl-2-(o-nitrophenoxy)propanamide, 2-methyl-2-(o-phenylazophenoxy)propanamide, 4-chlorobutanamide, 3-methyl-3-nitrobutanamide, o-nitrocinnamide, N-acetylmethionine derivative, o-nitrobenzamide and o-(benzoyloxymethyl)benzamide.

[0709] Nitrogen protecting groups such as carbamate groups (e.g., —C(═O)OR^{aa}) include, but are not limited to, methyl carbamate, ethyl carbamante, 9-fluorenylmethyl carbamate (Fmoc), 9-(2-sulfo)fluorenylmethyl carbamate, 9-(2,7-dibromo)fluoroenylmethyl carbamate, 2,7-di-t-butyl-[9-(10,10-dioxo-10,10,10,10-tetrahydrothioxanthyl)]methyl carbamate (DBD-Tmoc), 4-methoxyphenacyl carbamate (Phenoc), 2,2,2-trichloroethyl carbamate (Troc), 2-trimethylsilylethyl carbamate (Teoc), 2-phenylethyl carbamate (hZ), 1-(1-adamanty1)-1-methylethyl carbamate (Adpoc), 1,1-dimethyl-2-haloethyl carbamate, 1,1-dimethyl-2,2-dibromoethyl carbamate (DB-t-BOC), 1,1-dimethyl-2,2,2-trichloroethyl carbamate (TCBOC), 1-methyl-1-(4-biphenylyl)ethyl carbamate (Bpoc), 1-(3,5-di-t-butylphenyl)-1-methylethyl carbamate (t-Bumeoc), 2-(2′-and 4′-pyridyl)ethyl carbamate (Pyoc), 2-(N,N-dicyclohexylcarboxamido)ethyl carbamate, t-butyl carbamate (BOC), 1-adamantyl carbamate (Adoc), vinyl carbamate (Voc), allyl carbamate (Alloc), 1-isopropylallyl carbamate (Ipaoc), cinnamyl carbamate (Coc), 4-nitrocinnamyl carbamate (Noc), 8-quinolyl carbamate, N-hydroxypiperidinyl carbamate, alkyldithio carbamate, benzyl carbamate (Cbz), p-methoxybenzyl carbamate (Moz), p-nitobenzyl carbamate, p-bromobenzyl carbamate, p-chlorobenzyl carbamate, 2,4-dichlorobenzyl carbamate, 4-methylsulfinylbenzyl carbamate (Msz), 9-anthrylmethyl carbamate, diphenylmethyl carbamate, 2-methylthioethyl carbamate, 2-methylsulfonylethyl carbamate, 2-(p-toluenesulfonyl)ethyl carbamate, [2-(1,3-dithianyl)]methyl carbamate (Dmoc), 4-methylthiophenyl carbamate (Mtpc), 2,4-dimethylthiophenyl carbamate (Bmpc), 2-phosphonioethyl carbamate (Peoc), 2-triphenylphosphonioisopropyl carbamate (Ppoc), 1,1-dimethyl-2-cyanoethyl carbamate, m-chloro-p-acyloxybenzyl carbamate, p-(dihydroxyboryl)benzyl carbamate, 5-benzisoxazolylmethyl carbamate, 2-(trifluoromethyl)-6-chromonylmethyl carbamate (Tcroc), m-nitrophenyl carbamate, 3,5-dimethoxybenzyl carbamate, o-nitrobenzyl carbamate, 3,4-dimethoxy-6-nitrobenzyl carbamate, phenyl(o-nitrophenyl)methyl carbamate, t-amyl carbamate, S-benzyl thiocarbamate, p-cyanobenzyl carbamate, cyclobutyl carbamate, cyclohexyl carbamate, cyclopentyl carbamate, cyclopropylmethyl carbamate, p-decyloxybenzyl carbamate, 2,2-dimethoxyacylvinyl carbamate, o-(N,N-dimethylcarboxamido)benzyl carbamate, 1,1-dimethyl-3-(N,N-dimethylcarboxamido)propyl carbamate, 1,1-dimethylpropynyl carbamate, di(2-pyridyl)methyl carbamate, 2-furanylmethyl carbamate, 2-iodoethyl carbamate, isoborynl carbamate, isobutyl carbamate, isonicotinyl carbamate, p-(p′-methoxyphenylazo)benzyl carbamate, 1-methylcyclobutyl carbamate, 1-methylcyclohexyl carbamate, 1-methyl-1-cyclopropylmethyl carbamate, 1-methyl-1(3,5-dimethoxyphenyl)ethyl carbamate, 1-methyl-1-(p-phenylazophenyl)ethyl carbamate, 1-methyl-1-phenylethyl carbamate, 1- methyl-1-(4-pyridyl)ethyl carbamate, phenyl carbamate, p-(phenylazo)benzyl carbamate, 2,4,6-tri-t-butylphenyl carbamate, 4-(trimethylammonium)benzyl carbamate, and 2,4,6-trimethylbenzyl carbamate.

[0710] Nitrogen protecting groups such as sulfonamide groups (e.g., —S(═O)₂R^{aa}) include, but are not limited to, p-toluenesulfonamide (Ts), benzenesulfonamide, 2,3,6,-trimethyl-4-methoxybenzenesulfonamide (Mtr), 2,4,6-trimethoxybenzenesulfonamide (Mtb), 2,6-dimethyl-4-methoxybenzenesulfonamide (Pme), 2,3,5,6-tetramethyl-4-methoxybenzenesulfonamide (Mte), 4-methoxybenzenesulfonamide (Mbs), 2,4,6-trimethylbenzenesulfonamide (Mts), 2,6-dimethoxy-4-methylbenzenesulfonamide (iMds), 2,2,5,7,8-pentamethylchroman-6-sulfonamide (Pmc), methanesulfonamide (Ms), (3-trimethylsilylethanesulfonamide (SES), 9-anthracenesulfonamide, 4-(4′,8′-dimethoxynaphthylmethyl)benzenesulfonamide (DNMBS), benzylsulfonamide, trifluoromethylsulfonamide, and phenacylsulfonamide.

[0711] Other nitrogen protecting groups include, but are not limited to, phenothiazinyl-(10)-acyl derivative, N′-p-toluenesulfonylaminoacyl derivative, N′-phenylaminothioacyl derivative, N-benzoylphenylalanyl derivative, N-acetylmethionine derivative, 4,5-diphenyl-3-oxazolin-2-one, N-phthalimide, N-dithiasuccinimide (Dts), N-2,3-diphenylmaleimide, N-2,5-dimethylpyrrole, N-1,1,4,4- tetramethyldisilylazacyclopentane adduct (STABASE), 5-substituted 1,3-dimethyl-1,3,5-triazacyclohexan-2-one, 5-substituted 1,3-dibenzyl-1,3,5-triazacyclohexan-2-one, 1- substituted 3,5-dinitro-4-pyridone, N-methylamine, N-allylamine, N-[2-(trimethylsilyl)ethoxy]methylamine (SEM), N-3-acetoxypropylamine, N-(1-isopropyl-4-nitro-2-oxo-3-pyroolin-3-yl)amine, quaternary ammonium salts, N-benzylamine, N-di(4-methoxyphenyl)methylamine, N-5-dibenzosuberylamine, N-triphenylmethylamine (Tr), N-[(4-methoxyphenyl)diphenylmethyl]amine (MMTr), N-9-phenylfluorenylamine (PhF), N-2,7-dichloro-9-fluorenylmethyleneamine, N-ferrocenylmethylamino (Fcm), N-2- picolylamino N′-oxide, N-1,1-dimethylthiomethyleneamine, N-benzylideneamine, N-p-methoxybenzylideneamine, N-diphenylmethyleneamine, N-[(2-pyridyl)mesityl]methyleneamine, N—(N′,N′-dimethylaminomethylene)amine, N,N′-isopropylidenediamine, N-p-nitrobenzylideneamine, N-salicylideneamine, N-5-chlorosalicylideneamine, N-(5-chloro-2-hydroxyphenyl)phenylmethyleneamine, N-cyclohexylideneamine, N-(5,5-dimethyl-3-oxo-1-cyclohexenyl)amine, N-borane derivative, N-diphenylborinic acid derivative, N-[phenyl(pentaacylchromium- or tungsten)acyl]amine, N-copper chelate, N-zinc chelate, N-nitroamine, N-nitrosoamine, amine N-oxide, diphenylphosphinamide (Dpp), dimethylthiophosphinamide (Mpt), diphenylthiophosphinamide (Ppt), dialkyl phosphoramidates, dibenzyl phosphoramidate, diphenyl phosphoramidate, benzenesulfenamide, o-nitrobenzenesulfenamide (Nps), 2,4-dinitrobenzenesulfenamide, pentachlorobenzenesulfenamide, 2-nitro-4-methoxybenzenesulfenamide, triphenylmethylsulfenamide, and 3-nitropyridinesulfenamide (Npys).

[0712] In certain embodiments, the substituent present on an oxygen atom is an oxygen protecting group (also referred to as a hydroxyl protecting group). Oxygen protecting groups are well known in the art and include those described in detail in Protecting Groups in Organic Synthesis, T. W. Greene and P. G. M. Wuts, 3rd edition, John Wiley & Sons, 1999, incorporated herein by reference.

[0713] Exemplary oxygen protecting groups include, but are not limited to, methyl, methoxylmethyl (MOM), methylthiomethyl (MTM), t-butylthiomethyl, (phenyldimethylsilyl)methoxymethyl (SMOM), benzyloxymethyl (BOM), p-methoxybenzyloxymethyl (PMBM), (4-methoxyphenoxy)methyl (p-AOM), guaiacolmethyl (GUM), t-butoxymethyl, 4-pentenyloxymethyl (POM), siloxymethyl, 2-methoxyethoxymethyl (MEM), 2,2,2-trichloroethoxymethyl, bis(2-chloroethoxy)methyl, 2-(trimethylsilyl)ethoxymethyl (SEMOR), tetrahydropyranyl (THP), 3-bromotetrahydropyranyl, tetrahydrothiopyranyl, 1-methoxycyclohexyl, 4-methoxytetrahydropyranyl (MTHP), 4-methoxytetrahydrothiopyranyl, 4-methoxytetrahydrothiopyranyl S,S-dioxide, 1-[(2-chloro-4-methyl)phenyl]-4-methoxypiperidin-4-y1 (CTMP), 1,4-dioxan-2-yl, tetrahydrofuranyl, tetrahydrothiofuranyl, 2,3,3a,4,5,6,7,7a-octahydro-7,8,8-trimethyl-4,7-methanobenzofuran-2-yl, 1-ethoxyethyl, 1-(2-chloroethoxy)ethyl, 1-methyl-1-methoxyethyl, 1-methyl-1-benzyloxyethyl, 1-methyl-1-benzyloxy-2-fluoroethyl, 2,2,2-trichloroethyl, 2-trimethylsilylethyl, 2- (phenylselenyl)ethyl, t-butyl, allyl, p-chlorophenyl, p-methoxyphenyl, 2,4-dinitrophenyl, benzyl (Bn), p-methoxybenzyl, 3,4-dimethoxybenzyl, o-nitrobenzyl, p-nitrobenzyl, p-halobenzyl, 2,6-dichlorobenzyl, p-cyanobenzyl, p-phenylbenzyl, 2-picolyl, 4-picolyl, 3- methyl-2-picolyl N-oxido, diphenylmethyl, p,p′-dinitrobenzhydryl, 5-dibenzosuberyl, triphenylmethyl, a-naphthyldiphenylmethyl, p-methoxyphenyldiphenylmethyl, di(p-methoxyphenyl)phenylmethyl, tri(p-methoxyphenyl)methyl, 4-(4′-bromophenacyloxyphenyl)diphenylmethyl, 4,4′,4″-tris(4,5-dichlorophthalimidophenyl)methyl, 4,4′,4″-tris(levulinoyloxyphenyl)methyl, 4,4′,4″-tris(benzoyloxyphenyl)methyl, 3-(imidazol-1-yl)bis(4′,4″-dimethoxyphenyl)methyl, 1,1-bis(4-methoxyphenyl)-1′-pyrenylmethyl, 9-anthryl, 9-(9-phenyl)xanthenyl, 9-(9-phenyl-10-oxo)anthryl, 1,3-benzodisulfuran-2-yl, benzisothiazolyl S,S-dioxido, trimethylsilyl (TMS), triethylsilyl (TES), triisopropylsilyl (TIPS), dimethylisopropylsilyl (IPDMS), diethylisopropylsilyl (DEIPS), dimethylthexylsilyl, t-butyldimethylsilyl (TBDMS), t-butyldiphenylsilyl (TBDPS), tribenzylsilyl, tri-p-xylylsilyl, triphenylsilyl, diphenylmethylsilyl (DPMS), t-butylmethoxyphenylsilyl (TBMPS), formate, benzoylformate, acetate, chloroacetate, dichloroacetate, trichloroacetate, trifluoroacetate, methoxyacetate, triphenylmethoxyacetate, phenoxyacetate, p-chlorophenoxyacetate, 3-phenylpropionate, 4-oxopentanoate (levulinate), 4,4-(ethylenedithio)pentanoate (levulinoyldithioacetal), pivaloate, adamantoate, crotonate, 4-methoxycrotonate, benzoate, p-phenylbenzoate, 2,4,6-trimethylbenzoate (mesitoate), alkyl methyl carbonate, 9- fluorenylmethyl carbonate (Fmoc), alkyl ethyl carbonate, alkyl 2,2,2-trichloroethyl carbonate (Troc), 2-(trimethylsilyl)ethyl carbonate (TMSEC), 2-(phenylsulfonyl) ethyl carbonate (Psec), 2-(triphenylphosphonio) ethyl carbonate (Peoc), alkyl isobutyl carbonate, alkyl vinyl carbonate alkyl allyl carbonate, alkyl p-nitrophenyl carbonate, alkyl benzyl carbonate, alkyl p-methoxybenzyl carbonate, alkyl 3,4-dimethoxybenzyl carbonate, alkyl o-nitrobenzyl carbonate, alkyl p-nitrobenzyl carbonate, alkyl S-benzyl thiocarbonate, 4-ethoxy-1-napththyl carbonate, methyl dithiocarbonate, 2-iodobenzoate, 4-azidobutyrate, 4-nitro-4-methylpentanoate, o-(dibromomethyl)benzoate, 2-formylbenzenesulfonate, 2-(methylthiomethoxy)ethyl, 4-(methylthiomethoxy)butyrate, 2-(methylthiomethoxymethyl)benzoate, 2,6-dichloro-4-methylphenoxyacetate, 2,6-dichloro-4-(1,1,3,3-tetramethylbutyl)phenoxyacetate, 2,4-bis(1,1-dimethylpropyl)phenoxyacetate, chlorodiphenylacetate, isobutyrate, monosuccinoate, (E)-2-methyl-2-butenoate, o-(methoxyacyl)benzoate, a-naphthoate, nitrate, alkyl N,N,N′,N′-tetramethylphosphorodiamidate, alkyl N-phenylcarbamate, borate, dimethylphosphinothioyl, alkyl 2,4-dinitrophenylsulfenate, sulfate, methanesulfonate (mesylate), benzylsulfonate, and tosylate (Ts).

[0714] In certain embodiments, the substituent present on a sulfur atom is a sulfur protecting group (also referred to as a thiol protecting group). Sulfur protecting groups are well known in the art and include those described in detail in Protecting Groups in Organic Synthesis, T. W. Greene and P. G. M. Wuts, 3rd edition, John Wiley & Sons, 1999, incorporated herein by reference.

[0715] Exemplary sulfur protecting groups include, but are not limited to, alkyl, benzyl, p-methoxybenzyl, 2,4,6-trimethylbenzyl, 2,4,6-trimethoxybenzyl, o-hydroxybenzyl, p-hydroxybenzyl, o-acetoxybenzyl, p-acetoxybenzyl, p-nitrobenzyl, 4-picolyl, 2-quinolinylmethyl, 2-picolyl N-oxido, 9-anthrylmethyl, 9-fluorenylmethyl, xanthenyl, ferrocenylmethyl, diphenylmethyl, bis(4-methoxyphenyl)methyl, 5-dibenzosuberyl, triphenylmethyl, diphenyl-4-pyridylmethyl, phenyl, 2,4-dinitrophenyl, t-butyl, 1-adamantyl, methoxymethyl (MOM), isobutoxymethyl, benzyloxymethyl, 2-tetrahydropyranyl, benzylthiomethyl, phenylthiomethyl, thiazolidino, acetamidomethyl, trimethylacetamidomethyl, benzamidomethyl, allyloxycarbonylaminomethyl, phenylacetamidomethyl, phthalimidomethyl, acetylmethyl, carboxymethyl, cyanomethyl, (2-nitro-1-phenyl)ethyl, 2-(2,4-dinitrophenyl)ethyl, 2-cyanoethyl, 2-(Trimethylsilyl)ethyl, 2,2-bis(carboethoxy)ethyl, (1-m-nitrophenyl-2-benzoyl)othyl, 2-phenylsulfonylethyl, 2-(4-methylphenylsulfonyl)-2-methylprop-2-yl, acetyl, benzoyl, trifluoroacetyl, N-[[(p-biphenylyl)isopropoxy]carbonyl]-N-methyl]- y-aminothiobutyrate, 2,2,2-trichloroethoxycarbonyl, t-butoxycarbonyl, benzyloxycarbonyl, p-methoxybenzyloxycarbonyl, N-ethyl, N-methoxymethyl, sulfonate, sulfenylthiocarbonate, 3-nitro-2-pyridinesulfenyl sulfide, oxathiolone.

[0716] In an embodiment, optionally substituted heteroalkyl is unsubstituted or is substituted with one or more substituents independently selected from —CONH₂, —CO₂H, —COCH₂NH₂, —NH₂, —NH(C═NH)NH₂, or ═O (i.e., two geminal hydrogens on a carbon atom of the heteroalkyl are replaced with the group ═O). In an embodiment, optionally substituted heteroalkyl is unsubstituted. In an embodiment, optionally substituted heteroalkyl is substituted with one or more substituents independently selected from —CONH₂, —CO₂H, —COCH₂NH₂, —NH₂, —NH(C═NH)NH₂, or ═O (i.e., two geminal hydrogens on a carbon atom of the heteroalkyl are replaced with the group ═O).

### III. COMPOUNDS

[0717] The present invention relates to novel cyclic peptide inhibitors of the interleukin-23 receptor (IL-23R) or pharmaceutically acceptable salts, solvates, or forms thereof.

[0718] In particular, the present invention relates to a cyclic peptide inhibitors of the interleukin-23 receptor (IL-23R) or a pharmaceutically acceptable salt thereof, including those for which a structure is as identified in Table 1A, Table 1B, Table 1C, Table 1D, or Table 1 F of the present specification.

[0719] In one aspect, a cyclic peptide inhibitor compound of the interleukin-23 receptor (IL-23R) compound, or a pharmaceutically acceptable salt thereof, has a structure of a compound in Table 1A.

[0720] In another aspect, a cyclic peptide inhibitor compound of the interleukin-23 receptor (IL-23R) compound or a pharmaceutically acceptable salt thereof, has a structure of a compound in Table 1B.

[0721] In another aspect, a cyclic peptide inhibitor compound of the interleukin-23 receptor (IL-23R) compound or a pharmaceutically acceptable salt thereof, has a structure of a compound in Table 1C.

[0722] In another aspect, a cyclic peptide inhibitor compound of the interleukin-23 receptor (IL-23R) compound or a pharmaceutically acceptable salt thereof, has a structure of a compound in Table ID.

[0723] In another aspect, a cyclic peptide inhibitor compound of the interleukin-23 receptor (IL-23R) compound or a pharmaceutically acceptable salt thereof, has a structure of a compound in Table 1E.

[0724] In another aspect, a cyclic peptide inhibitor compound of the interleukin-23 receptor (IL-23R) compound or a pharmaceutically acceptable salt thereof, has a structure of a compound in Table IF.

[0725] Table 1A. Compounds

Lengthy table referenced here
US20260022143A1-20260122-T00001
Please refer to the end of the specification for access instructions.

TABLE 1B
Compounds

| SEQ ID | Harmonized Sequences txt |
|---|---|
| 52 | CF3CO-Pen(3)-N(N(Me)2)-T-7MeW-K(Ac)-Pen(3)-AEF-2Nal-THP-K(Ac)-N- |
| | 3Pya-Sar-CONH2 |
| 66 | CF3CO-Pen(3)-N(N(Me)2)-T-7MeW-K(NMeAc)-Pen(3)-AEF(N(Me)2)-2Nal- |
| | THP-K(NMeAc)-N-3Pya-Sar-CON(Me)2 |
| 68 | CF3CO-Pen(3)-N(N(Me)2)-T-7MeW-K(NMeAc)-Pen(3)-AEF-2Nal-THP- |
| | K(NMeAc)-N-3Pya-Sar-CON(Me)2 |
| 79 | CF3CO-Pen(3)-N(N(Me)2)-T-7MeW-K(NMeAc)-Pen(3)-AEF(N(Me)2)-2Nal- |
| | THP-Q(N(Me)2)-N-3Pya-Sar-CONH2 |
| 91 | 5cpaCO-Pen(3)-N(N(Me)2)-T-7MeW-Q(N(Me)2)-Pen(3)-AEF(N(Me)2)-2Nal- |
| | THP-Q(N(Me)2)-N-3Pya-Sar-CON(Me)2 |
| 93 | CF3CO-K(Me)3-Pen(3)-N(N(Me)2)-T-7MeW-K(NMeAc)-Pen(3)- |
| | AEF(N(Me)2)-2Nal-THP-E-N-3Pya-Sar-CON(Me)2 |
| 94 | CF3CO-Pen(3)-N(N(Me)2)-T-7CF3W-K(NMeAc)-Pen(3)-AEF-2Nal-THP- |
| | K(NMeAc)-N-3Pya-Sar-CON(Me)2 |
| 95 | CF3CO-Pen(3)-N(N(Me)2)-T-7CF3W-K(NMeAc)-Pen(3)-AEF(N(Me)2)-2Nal- |
| | THP-K(NMeAc)-N-3Pya-Sar-CON(Me)2 |
| 96 | CF3CO-k(5cpa)-Pen(3)-N(N(Me)2)-T-7MeW-Q(N(Me)2)-Pen(3)- |
| | AEF(N(Me)2)-2Nal-THP-Q(N(Me)2)-N-3Pya-Sar-CON(Me)2 |
| 97 | 5cpaCO-Pen(3)-N(N(Me)2)-T-7MeW-Q(N(Me)2)-Pen(3)-AEF(N(Me)2)-2Nal- |
| | THP-E-N-3Pya-Sar-CON(Me)2 |
| 98 | MeCO-Pen(3)-N(N(Me)2)-T-7MeW-K(NMeAc)-Pen(3)-AEF(N(Me)2)-2Nal- |
| | THP-Dap(Ac)-N-3Pya-Sar-CON(Me)2 |
| 100 | 5cpaCO-Pen(3)-N(N(Me)2)-T-7MeW-Q(N(Me)2)-Pen(3)-AEF(N(Me)2)-2Nal- |
| | Pip(NMe2)-Q(N(Me)2)-N-3Pya-Sar-CON(Me)2 |
| 101 | 5cpaCO-Pen(3)-N(N(Me)2)-T-7MeW-Q(N(Me)2)-Pen(3)-TMAPF-2Nal-THP- |
| | Q(N(Me)2)-N-3Pya-Sar-CON(Me)2 |
| 104 | CF3CO-Pen(3)-N(N(Me)2)-T-7MeW-K(NMeAc)-Pen(3)-AEF(N(Me)2)-2Nal- |
| | THP-E-N-3Pya-Sar-CON(Me)2 |
| 105 | MeCO-k(Me)3-Pen(3)-N(N(Me)2)-T-7MeW-K(NMeAc)-Pen(3)-AEF(N(Me)2)- |
| | 2Nal-THP-E-N-3Pya-Sar-CON(Me)2 |
| 106 | MeCO-Pen(3)-N(N(Me)2)-T-7MeW-K(NMeAc)-Pen(3)-AEF(N(Me)2)-2Nal- |
| | THP-E-N-3Pya-Sar-CON(Me)2 |
| 117 | MeCO-Pen(3)-N(N(Me)2)-T-7MeW-K(Me)3-Pen(3)-AEF(N(Me)2)-2Nal-THP- |
| | K(Me)3-N-3Pya-Sar-CON(Me)2 |
| 118 | MeCO-Pen(3)-N(N(Me)2)-T-7MeW-Q(N(Me)2)-Pen(3)-AEF(N(Me)2)-2Nal- |
| | THP-Q(N(Me)2)-N-3Pya-Sar-CON(Me)2 |
| 120 | MeCO-Pen(3)-N(N(Me)2)-T-7MeW-Q(N(Me)2)-Pen(3)-AEF(N(Me)2)-2Nal- |
| | THP-E-N-3Pya-Sar-CON(Me)2 |
| 122 | MeCO-Pen(3)-N(N(Me)2)-T-7MeW-K(NMeAc)-Pen(3)-AEF(N(Me)2)-2Nal- |
| | THP-K(NMeAc)-N-3Pya-Sar-CON(Me)2 |
| 129 | MeCO-Pen(3)-N(N(Me)2)-t-7MeW-Dab(NMeAc)-Pen(3)-AEF-2Nal-THP-E-N- |
| | 3Pya-Sar-CON(Me)2 |
| 130 | MeCO-Pen(3)-N(N(Me)2)-T-7MeW-Dab(NMecPEG2a)-Pen(3)-AEF-2Nal- |
| | THP-E-N-3Pya-Sar-CON(Me)2 |
| 131 | MeCO-Pen(3)-N(N(Me)2)-t-7MeW-Dab(NMecarn)-Pen(3)-AEF-2Nal-THP-E- |
| | N-3Pya-Sar-CON(Me)2 |
| 133 | 5cpaCO-Pen(3)-N(N(Me)2)-T-7MeW-K(NMeAc)-Pen(3)-AEF(N(Me)2)-2Nal- |
| | THP-Dap(Ac)-N-3Pya-Sar-CON(Me)2 |
| 139 | cPEG3aCO-Pen(3)-N(N(Me)2)-T-7MeW-Q(N(Me)2)-Pen(3)-AEF-2Nal-THP- |
| | Q(N(Me)2)-N-3Pya-Sar-CON(Me)2 |
| 140 | cPEG5aCO-Pen(3)-N(N(Me)2)-t-7MeW-Dab(NMeAc)-Pen(3)-AEF-2Nal-THP- |
| | Dab(NMeAc)-N-3Pya-Sar-CON(Me)2 |
| 141 | MeCO-Pen(3)-N(N(Me)2)-T-7MeW-Dab(NMeCOmPEG6)-Pen(3)-AEF-2Nal- |
| | THP-Dab(NMeCOmPEG6)-N-3Pya-Sar-CON(Me)2 |
| 142 | cPEG3aCO-Pen(3)-N(N(Me)2)-T-7MeW-AIB-Pen(3)-AEF-2Nal-THP-AIB-N- |
| | 3Pya-Sar-CON(Me)2 |
| 143 | mPEG6CO-SP6-Pen(3)-N(N(Me)2)-T-7MeW-Dab(NMecPEG5a)-Pen(3)-AEF- |
| | 2Nal-THP-E-N-3Pya-Sar-CON(Me)2 |
| 145 | cPEG5aCO-Pen(3)-N(N(Me)2)-T-7MeW-Dab(NMecPEG5a)-Pen(3)-AEF-2Nal- |
| | THP-E-N-3Pya-Sar-CON(Me)2 |
| 146 | mPEG3CO-SP6-Pen(3)-N(N(Me)2)-T-7MeW-Q(N(Me)2)-Pen(3)-AEF-2Nal- |
| | THP-Q(N(Me)2)-N-3Pya-Sar-CONH2 |
| 147 | cPEG3aCO-Pen(3)-N(N(Me)2)-T-7MeW-Q(N(Me)2)-Pen(3)-AEF-2Nal-THP- |
| | Q(N(Me)2)-N-3Pya-Sar-CONH2 |
| 148 | mPEG3CO-SP6-Pen(3)-N(N(Me)2)-T-7MeW-K(NMeAc)-Pen(3)-AEF-2Nal- |
| | THP-K(Ac)-N-3Pya-Sar-CONH2 |
| 149 | cPEG3aCO-Pen(3)-N(N(Me)2)-T-7MeW-K(NMeAc)-Pen(3)-AEF-2Nal-THP- |
| | K(Ac)-N-3Pya-Sar-CONH2 |
| 150 | cPEG3aCO-Pen(3)-N(N(Me)2)-T-7MeW-K(NMeAc)-Pen(3)-AEF-2Nal-THP- |
| | Q(N(Me)2)-N-3Pya-Sar-CONH2 |
| 151 | MeCO-Pen(3)-N(N(Me)2)-t-7MeW-Dab(NMeCarn)-Pen(3)-AEF-2Nal-THP-E- |
| | N-3Pya-Sar-CON(Me)2 |
| 152 | mPEG3CO-SP6-Pen(3)-N(N(Me)2)-T-7MeW-K(NMeAc)-Pen(3)-AEF-2Nal- |
| | THP-QNMe2-N-3Pya-Sar-CONH2 |
| 154 | cPEG3aCO-Pen(3)-N(N(Me)2)-T-7MeW-Q(N(Me)2)-Pen(3)-AEF(N(Me)2)- |
| | 2Nal-THP-Q(N(Me)2)-N-3Pya-Sar-CON(Me)2 |
| 157 | MeCO-Pen(3)-N(N(Me)2)-t-7MeW-Dab(NMeAc)-Pen(3)-AEF-2Nal-THP-AIB- |
| | N-3Pya-Sar-CON(Me)2 |
| 158 | MeCO-Pen(3)-N(N(Me)2)-T-7MeW-Dab(NMeCOmPEG6)-Pen(3)-AEF-2Nal- |
| | THP-E-N-3Pya-Sar-CON(Me)2 |
| 159 | cPEG3aCO-Pen(3)-N(N(Me)2)-T-7MeW-Q(N(Me)2)-Pen(3)-AEF-2Nal-THP- |
| | Dab(NMeAc)-N-3Pya-Sar-CON(Me)2 |
| 160 | cPEG3aCO-Pen(3)-N(N(Me)2)-t-7MeW-Dab(NMeAc)-Pen(3)-AEF-2Nal-THP- |
| | Dab(NMeAc)-N-3Pya-Sar-CON(Me)2 |
| 163 | MeCO-hk(Me)3-Pen(3)-N(N(Me)2)-T-7MeW-K(NMeAc)-Pen(3)-AEF-2Nal- |
| | THP-E-N-3Pya-Sar-CON(Me)2 |
| 164 | cPEG3aCO-Pen(3)-N(N(Me)2)-T-7MeW-K(NMeAc)-Pen(3)-TMAPF-2Nal- |
| | THP-K(NMeAc)-N-3Pya-Sar-CON(Me)2 |
| 165 | cPEG3aCO-Pen(3)-N(N(Me)2)-T-7MeW-K(NMeAc)-Pen(3)-TMAPF-2Nal- |
| | THP-E-N-3Pya-Sar-CON(Me)2 |
| 169 | cPEG3aCO-Pen(3)-N(N(Me)2)-T-7MeW-K(NMeAc)-Pen(3)-AEF-2Nal-THP- |
| | K(NMeAc)-N-3Pya-Sar-CONH2 |
| 170 | MeCO-Pen(3)-N(N(Me)2)-t-7MeW-Dab(NMeAc)-Pen(3)-AEF-2Nal-THP- |
| | Dab(NMeAc)-N-3Pya-Sar-CON(Me)2 |
| 171 | cPEG3aCO-Pen(3)-N(N(Me)2)-t-7MeW-Dab(NMeAc)-Pen(3)-AEF-2Nal-THP- |
| | K(NMeAc)-N-3Pya-Sar-CONH2 |
| 172 | cPEG5aCO-Pen(3)-N(N(Me)2)-T-7MeW-Dab(NMecPEG2a)-Pen(3)-AEF-2Nal- |
| | THP-Dab(NMecPEG2a)-N-3Pya-Sar-CON(Me)2 |
| 173 | cPEG5aCO-Pen(3)-N(N(Me)2)-T-7MeW-Q(N(Me)2)-Pen(3)-AEF-2Nal-THP- |
| | Dab(NMeAc)-N-3Pya-Sar-CON(Me)2 |
| 175 | MeCO-Pen(3)-N(N(Me)2)-T-7MeW-Dab(NMecPEG3a)-Pen(3)-AEF-2Nal- |
| | THP-Dab(NMecPEG3a)-N-3Pya-Sar-CON(Me)2 |
| 176 | cPEG3aCO-Pen(3)-N(N(Me)2)-t-7MeW-Dab(NMeAc)-Pen(3)-AEF-2Nal-THP- |
| | E-N-3Pya-Sar-CON(Me)2 |
| 177 | cPEG3aCO-Pen(3)-N(N(Me)2)-T-7MeW-K(NMeAc)-Pen(3)-AEF-2Nal-THP- |
| | Dab(NMeAc)-N-3Pya-Sar-CON(Me)2 |
| 179 | cPEG3aCO-Pen(3)-N(N(Me)2)-T-7MeW-K(NMeAc)-Pen(3)-AEF-2Nal-diFCpx- |
| | Dab(NMeAc)-N-3Pya-Sar-CON(Me)2 |
| 180 | cPEG3aCO-Pen(3)-N(N(Me)2)-T-7MeW-K(NMeAc)-Pen(3)-AEF-2Nal-diFCpx- |
| | Dab(NMeAc)-N-3Pya-Sar-CON(Me)2 |
| 181 | cPEG3aCO-Pen(3)-N(N(Me)2)-T-7MeW-K(NMeAc)-Pen(3)-APEG3F-2Nal- |
| | THP-K(NMeAc)-N-3Pya-Sar-CON(Me)2 |
| 182 | MeCO-Pen(3)-N(N(Me)2)-T-7MeW-K(NMeAc)-Pen(3)-AEF-2Nal-THP- |
| | K(NMeAc)-N-3Pya-Sar-CONH2 |
| 183 | MeCO-Pen(3)-N(N(Me)2)-T-7MeW-K(NMeAc)-Pen(3)-APEG3F-2Nal-THP- |
| | K(NMeAc)-N-3Pya-Sar-CON(Me)2 |
| 184 | cPEG3aCO-Pen(3)-N(N(Me)2)-T-7MeW-K(NMeAc)-Pen(3)-APEG3F-2Nal- |
| | THP-E-N-3Pya-Sar-CON(Me)2 |
| 187 | cPEG3aCO-Pen(3)-N(N(Me)2)-T-7MeW-K(NMeAc)-Pen(3)-4DMPEF-2Nal- |
| | THP-K(NMeAc)-N-3Pya-Sar-CON(Me)2 |
| 190 | MeCO-Pen(3)-N(N(Me)2)-T-7MeW-K(NMeAc)-Pen(3)-TMAPF-2Nal-THP- |
| | K(NMeAc)-N-3Pya-Sar-CON(Me)2 |
| 191 | cPEG3aCO-Pen(3)-N(N(Me)2)-t-7MeW-Dab(NMeAc)-Pen(3)-AEF-2Nal-THP- |
| | Dab(NMeAc)-N-3Pya-Sar-CONH(PEG3a) |
| 193 | cPEG3aCO-Pen(3)-N(N(Me)2)-T-7MeW-K(NMeAc)-Pen(3)-4DMPzEF-2Nal- |
| | THP-K(NMeAc)-N-3Pya-Sar-CON(Me)2 |
| 196 | cPEG3aCO-Pen(3)-N(N(Me)2)-T-7MeW-Dab(NMecPEG3a)-Pen(3)-AEF-2Nal- |
| | THP-Dab(NMeAc)-N-3Pya-Sar-CON(Me)2 |
| 197 | mPEG3CO-SP6-Pen(3)-N(N(Me)2)-T-7MeW-K(NMeAc)-Pen(3)-APEG3F- |
| | 2Nal-THP-Dab(NMeAc)-N-3Pya-Sar-CON(Me)2 |
| 198 | cPEG3aCO-Pen(3)-N(N(Me)2)-T-7MeW-K(NMeac)-Pen(3)-MMoEF-2Nal- |
| | THP-K(NMeAc)-N-3Pya-Sar-CON(Me)2 |
| 199 | cPEG3aCO-Pen(3)-N(N(Me)2)-T-7MeW-K(NMeAc)-Pen(3)-APEG2F-2Nal- |
| | THP-K(NMeAc)-N-3Pya-Sar-CON(Me)2 |
| 202 | cPEG3aCO-Pen(3)-N(N(Me)2)-T-7MeW-K(NMeAc)-Pen(3)-DMPMF-2Nal- |
| | THP-K(NMeAc)-N-3Pya-Sar-CON(Me)2 |
| 203 | cPEG3aCO-Pen(3)-N(N(Me)2)-T-7MeW-K(NMeAc)-Pen(3)-AEF(BisMEP))- |
| | 2Nal-THP-K(NMeAc)-N-3Pya-Sar-CON(Me)2 |
| 206 | cPEG3aCO-Pen(3)-N(N(Me)2)-T-7MeW-K(NMeAc)-Pen(3)-AEF(NsCh)-2Nal- |
| | THP-K(NMeAc)-N-3Pya-Sar-CON(Me)2 |
| 207 | cPEG3aCO-Pen(3)-N(N(Me)2)-T-7MeW-K(NMeAc)-Pen(3)-AEF(AcCh)-2Nal- |
| | THP-K(NMeAc)-N-3Pya-Sar-CON(Me)2 |
| 208 | cPEG3aCO-Pen(3)-N(N(Me)2)-T-7MeW-K(NMeAc)-Pen(3)-AEF((Ch)cPEG3a)- |
| | 2Nal-THP-K(NMeAc)-N-3Pya-Sar-CON(Me)2 |
| 209 | cPEG3aCO-Pen(3)-N(N(Me)2)-T-7MeW-K(NMeAc)-Pen(3)-APEG3F-2Nal- |
| | THP-Dab(NMeAc)-N-3Pya-Sar-CON(Me)2 |
| 210 | cPEG3aCO-Pen(3)-N(N(Me)2)-T-7MeW-K(NMeAc)-Pen(3)-ACHMF-2Nal- |
| | THP-K(NMeAc)-N-3Pya-Sar-CON(Me)2 |
| 211 | cPEG3aCo-Pen(3)-N(NMe2)-T-7MeW-K(NMeAc)-Pen(3)-AEF(NHCh)-2Nal- |
| | THP-K(NMeAc)-N-3Pya-Sar-CON(Me)2 |
| 212 | cPEG3aCO-Pen(3)-N(N(Me)2)-T-7MeW-K(NMeAc)-Pen(3)-APEG3F-2Nal- |
| | THP-Dab(NMeAc)-N-3Pya-Sar-CON(Me)2 |
| 213 | MeCO-k(d)-Pen(3)-N(N(Me)2)-T-7MeW-K(NMeAc)-Pen(3)-APEG3F-2Nal- |
| | THP-Dab(NMeAc)-N-3Pya-Sar-CON(Me)2 |
| 214 | MeCO-Pen(3)-N(N(Me)2)-t-7MeW-Dab(NMecarn)-Pen(3)-APEG3F-2Nal- |
| | THP-K(NMeAc)-N-3Pya-Sar-CON(Me)2 |
| 215 | cPEG3aCO-Pen(3)-N(N(Me)2)-T-7MeW-K(NMeAc)-Pen(3)-DMMMF-2Nal- |
| | THP-K(NMeAc)-N-3Pya-Sar-CON(Me)2 |
| 216 | MeCO-k(Me)3-Pen(3)-N(N(Me)2)-T-7MeW-K(NMeAc)-Pen(3)-APEG3F-2Nal- |
| | THP-K(NMeAc)-N-3Pya-Sar-CON(Me)2 |
| 217 | MeCO-Pen(3)-N(N(Me)2)-T-7MeW-K(NMePEG3a)-Pen(3)-APEG3F-2Nal- |
| | THP-K(NMeAc)-N-3Pya-Sar-CON(Me)2 |
| 218 | MeCO-Pen(3)-N(N(Me)2)-T-7MeW-K(NMeAc)-Pen(3)-APEG3F-2Nal-THP- |
| | K(NMePEG3a)-N-3Pya-Sar-CON(Me)2 |
| 219 | MeCO-Pen(3)-N(N(Me)2)-T-7MeW-K(NMeAc)-Pen(3)-TMAPF-2Nal-THP- |
| | K(NMeAc)-N-3Pya-Sar-CO(NHPEG3a) |
| 220 | cPEG3aCO-Pen(3)-N(N(Me)2)-T-7MeW-K(NMeAc)-Pen(3)-TMAPF-2Nal- |
| | THP-K(NMeAc)-N-3Pya-Sar-CO(NHPEG3a) |
| 221 | cPEG3aCO-Pen(3)-N(N(Me)2)-T-7MeW-K(NMeAc)-Pen(3)-AEF(BisMEPa)- |
| | 2Nal-THP-K(NMeAc)-N-3Pya-Sar-CON(Me)2Â |
| 222 | cPEG3aCO-Pen(3)-N(N(Me)2)-T-7MeW-K(NMeAc)-Pen(3)-ACHMF-2Nal- |
| | THP-K(NMeAc)-N-3Pya-Sar-CON(Me)2 |
| 223 | cPEG3aCO-Pen(3)-N(N(Me)2)-T-7MeW-K(NMeAc)-Pen(3)-MMPEG3F-2Nal- |
| | THP-K(NMeAc)-N-3Pya-Sar-CON(Me)2 |
| 224 | cPEG3aCO-Pen(3)-N(N(Me)2)-T-7MeW-K(NMeAc)-Pen(3)-MPzPEG3F-2Nal- |
| | THP-K(NMeAc)-N-3Pya-Sar-CON(Me)2 |
| 225 | mPEG3CO-SP6-Pen(3)-N(N(Me)2)-T-7MeW-K(NMeAc)-Pen(3)-APEG3F- |
| | 2Nal-THP-K(NMeAc)-N-3Pya-Sar-CON(Me)2 |
| 226 | cPEG3aCO-Pen(3)-N(N(Me)2)-T-7MeW-K(NMeAc)-Pen(3)-TMA4F-2Nal- |
| | THP-K(NMeAc)-N-3Pya-Sar-CON(Me)2 |
| 227 | cPEG3aCO-Pen(3)-N(N(Me)2)-T-7MeW-K(NMeAc)-Pen(3)-mPEG2TMA4F- |
| | 2Nal-THP-K(NMeAc)-N-3Pya-Sar-CON(Me)2 |
| 228 | cPEG3aCO-Pen(3)-N(N(Me)2)-T-7MeW-K(NMeAc)-Pen(3)-mPEG2TMA2F- |
| | 2Nal-THP-K(NMeAc)-N-3Pya-Sar-CON(Me)2 |
| 229 | cPEG3aCO-Pen(3)-N(N(Me)2)-T-7MeW-K(NMeAc)-Pen(3)-TMA3F-2Nal- |
| | THP-K(NMeAc)-N-3Pya-Sar-CON(Me)2 |
| 230 | cPEG3aCO-Pen(3)-N(N(Me)2)-T-7MeW-K(NMeAc)-Pen(3)-TMA3F-2Nal- |
| | THP-K(NMeAc)-N-3Pya-Sar-CON(Me)2 |
| 231 | cPEG3aCO-Pen(3)-N(N(Me)2)-T-7MeW-K(NMeac)-Pen(3)-NPyEF-2Nal-THP- |
| | K(NMeAc)-N-3Pya-Sar-CON(Me)2 |
| 232 | MeCO-APEG2ser-Pen(3)-N(N(Me)2)-T-7MeW-K(NMeAc)-Pen(3)-APEG3F- |
| | 2Nal-THP-K(NMeAc)-N-3Pya-Sar-CON(Me)2 |
| 233 | cPEG3aCO-Pen(3)-N(N(Me)2)-T-7MeW-K(NMeAc)-Pen(3)-APEG3F-2Nal- |
| | THP-K(Ac)-N-3Pya-Sar-CON(Me)2 |
| 234 | cPEG3aCO-Pen(3)-N(N(Me)2)-T-7MeW-K(NMeAc)-Pen(3)-AEF(MePrpa)- |
| | 2Nal-THP-K(NMeAc)-N-3Pya-Sar-CON(Me)2 |
| 236 | cPEG3aCO-Pen(3)-N(N(Me)2)-T-7MeW-K(NMeAc)-Pen(3)-Y(C9OH)-2Nal- |
| | THP-K(NMeAc)-N-3Pya-Sar-CON(Me)2 |
| 237 | cPEG3aCO-Pen(3)-N(N(Me)2)-T-7MeW-K(NMeAc)-Pen(3)-AEF(NMePEG2a)- |
| | 2Nal-THP-K(NMeAc)-N-3Pya-Sar-CON(Me)2 |
| 238 | cPEG3aCO-Pen(3)-N(N(Me)2)-T-7MeW-K(NMeAc)-Pen(3)-AEF(PEG2a)- |
| | 2Nal-THP-K(NMeAc)-N-3Pya-Sar-CON(Me)2 |
| 239 | cPEG3aCO-Pen(3)-N(N(Me)2)-T-7MeW-K(NMeAc)-pen(3)- |
| | AEF(NMe2mPEG3)-2Nal-THP-K(NMeAc)-N-3Pya-Sar-CON(Me)2 |
| 241 | cPEG3aCO-Pen(3)-N(N(Me)2)-T-7MeW-K(NMeAc)-Pen(3)- |
| | AEF(NMeBismPEG3)-2Nal-THP-K(NMeAc)-N-3Pya-Sar-CON(Me)2 |
| 242 | cPEG3aCO-Pen(3)-N(N(Me)2)-T-7MeW-K(NMeAc)-Pen(3)-YC8COPip-2Nal- |
| | THP-K(NMeAc)-N-3Pya-Sar-CON(Me)2 |
| 243 | cPEG3aCO-Pen(3)-N(N(Me)2)-T-7MeW-K(Ac)-Pen(3)-APEG3F-2Nal-THP- |
| | K(NMeAc)-N-3Pya-Sar-CON(Me)2 |
| 244 | MeCO-Pen(3)-N(N(Me)2)-T-7MeW-K(NMeAc)-Pen(3)-APEG3F-2Nal-THP- |
| | APEG2Ser(S*)-N-3Pya-Sar-CON(Me)2 |
| 245 | cPEG3aCO-Pen(3)-N(N(Me)2)-T-7MeW-APEG2Ser-Pen(3)-AEF-2Nal-THP- |
| | K(NMeAc)-N-3Pya-Sar-CON(Me)2 |
| 246 | cPEG3aCO-Pen(3)-N(N(Me)2)-T-7MeW-APEG2Ser(R*)-Pen(3)-AEF-2Nal- |
| | THP-K(NMeAc)-N-3Pya-Sar-CON(Me)2 |
| 247 | cPEG3aCO-Pen(3)-N(N(Me)2)-T-7MeW-APEG2Ser(S*)-Pen(3)-TMAPF-2Nal- |
| | THP-K(NMeAc)-N-3Pya-Sar-CON(Me)2 |
| 248 | cPEG3aCO-Pen(3)-N(N(Me)2)-T-7MeW-APEG2Ser(R*)-Pen(3)-TMAPF-2Nal- |
| | THP-K(NMeAc)-N-3Pya-Sar-CON(Me)2 |
| 254 | cPEG3aCO-Pen(3)-N(N(Me)2)-T-7MeW-K(NMeAc)-Pen(3)- |
| | YC8CO(NHPEG3a)-2Nal-THP-K(NMeAc)-N-3Pya-Sar-CON(Me)2 |
| 255 | MeCO-Pen(3)-N(N(Me)2)-T-7MeW-APEG2Ser(R*)-Pen(3)-APEG3F-2Nal- |
| | THP-APEG2Ser(S*)-N-3Pya-Sar-CON(Me)2 |
| 256 | MeCO-Pen(3)-N(N(Me)2)-T-7MeW-APEG2Ser(S*)-Pen(3)-APEG3F-2Nal- |
| | THP-APEG2Ser(S*)-N-3Pya-Sar-CON(Me)2 |
| 257 | MeCO-Pen(3)-N(N(Me)2)-t-7MeW-Dab(NMecarn)-Pen(3)-APEG3F-2Nal- |
| | THP-Dab(NMeAc)-N-3Pya-Sar-CON(Me)2 |
| 261 | cPEG3aCO-Pen(3)-N(N(Me)2)-T-7MeW-K(NMeAc)-pen(3)-AEF(NMe3)-2Nal- |
| | THP-K(NMeAc)-N-3Pya-Sar-CON(Me)2 |
| 262 | cPEG3aCO-Pen(3)-N(N(Me)2)-T-7MeW-K(NMeAc)-Pen(3)-MTASF-2Nal- |
| | THP-K(NMeAc)-N-3Pya-Sar-CON(Me)2 |
| 263 | cPEG3aCO-Pen(3)-N(N(Me)2)-T-7MeW-K(NMeAc)-Pen(3)-TBAPEG3F-2Nal- |
| | THP-K(NMeAc)-N-3Pya-Sar-CON(Me)2 |
| 264 | cPEG3aCO-Pen(3)-N(N(Me)2)-T-7MeW-K(NMeAc)-Pen(3)-AEF(aPEG2a)- |
| | 2Nal-THP-K(NMeAc)-N-3Pya-Sar-CON(Me)2 |
| 265 | cPEG3aCO-Pen(3)-N(N(Me)2)-T-7MeW-K(NMeAc)-Pen(3)- |
| | AEF(BisPEG2a)(RS)-2Nal-THP-K(NMeAc)-N-3Pya-Sar-CON(Me)2 |
| 266 | cPEG3aCO-Pen(3)-N(N(Me)2)-T-7MeW-K(NMeAc)-Pen(3)- |
| | AEF(BisPEG2a)(S*)-2Nal-THP-K(NMeAc)-N-3Pya-Sar-CON(Me)2 |
| 267 | MeCO-Pen(3)-N(N(Me)2)-T-7MeW-APEG2Ser(S*)-Pen(3)-APEG3F-2Nal- |
| | THP-K(NMeAc)-N-3Pya-Sar-CON(Me)2 |
| 268 | MeCO-Pen(3)-N(N(Me)2)-T-7MeW-APEG2Ser(R*)-Pen(3)-APEG3F-2Nal- |
| | THP-K(NMeAc)-N-3Pya-Sar-CON(Me)2 |
| 269 | cPEG3aCO-Pen(3)-N(N(Me)2)-T-7MeW-K(NMeAc)-Pen(3)-DMTASF-2Nal- |
| | THP-K(NMeAc)-N-3Pya-Sar-CON(Me)2 |
| 271 | cPEG3aCO-Pen(3)-N(N(Me)2)-T-7MeW-K(NMeAc)-Pen(3)-morfTMA4F- |
| | 2Nal-THP-K(NMeAc)-N-3Pya-Sar-CON(Me)2 |
| 272 | cPEG3aCO-Pen(3)-N(N(Me)2)-T-7MeW-K(NMeAc)-Pen(3)-mPEG3TMA4F- |
| | 2Nal-THP-K(NMeAc)-N-3Pya-Sar-CON(Me)2 |
| 273 | cPEG3aCO-Pen(3)-N(N(Me)2)-T-7MeW-K(NMeAc)-Pen(3)-PiperazinequatF- |
| | 2Nal-THP-K(NMeAc)-N-3Pya-Sar-CON(Me)2 |
| 274 | cPEG3aCO-Pen(3)-N(N(Me)2)-T-7MeW-K(NMeac)-Pen(3)-MMoPF-2Nal- |
| | THP-K(NMeAc)-N-3Pya-Sar-CON(Me)2 |
| 275 | MeCO-Pen(3)-N(N(Me)2)-T-7MeW-K(NMeAc)-Pen(3)-TMAPF-2Nal-THP- |
| | APEG2Ser-N-3Pya-Sar-CON(Me)2 |
| 277 | cPEG3aCO-Pen(3)-N(N(Me)2)-T-7MeW-K(NMeAc)-Pen(3)-AEF(SPD)-2Nal- |
| | THP-K(NMeAc)-N-3Pya-Sar-CON(Me)2 |
| 278 | MeCO-Pen(3)-N(N(Me)2)-t-7MeW-Dab(NMecarn)-Pen(3)-APEG3F-2Nal- |
| | THP-Dab(NMecarn)-N-3Pya-Sar-CON(Me)2 |
| 279 | MeCO-Pen(3)-N(N(Me)2)-T-7MeW-K(Ac)-Pen(3)-AEF-2Nal-THP-K(Ac)-N- |
| | 3Pya-Sar-CONH2 |
| 283 | cPEG3aCO-Pen(3)-N(N(Me)2)-T-7MeW-K(NMeAc)-Pen(3)-Y(OTzlChmPEG3)- |
| | 2Nal-THP-K(NMeAc)-N-3Pya-Sar-CON(Me)2 |
| 284 | cPEG3aCO-Pen(3)-N(N(Me)2)-T-7MeW-K(NMeAc)-Pen(3)-Y(OTzlTMA4)- |
| | 2Nal-THP-K(NMeAc)-N-3Pya-Sar-CON(Me)2 |
| 285 | cPEG3aCO-Pen(3)-N(N(Me)2)-T-7MeW-K(NMeAc)-Pen(3)-Y(OTzlChmPEG)- |
| | 2Nal-THP-K(NMeAc)-N-3Pya-Sar-CON(Me)2 |
| 286 | cPEG3aCO-Pen(3)-N(N(Me)2)-T-7MeW-K(NMeAc)-Pen(3)-Y(OTzlCh)-2Nal- |
| | THP-K(NMeAc)-N-3Pya-Sar-CON(Me)2 |
| 287 | cPEG3aCO-Pen(3)-N(N(Me)2)-T-7MeW-K(NMeAc)-Pen(3)-Tzl(Ch)-2Nal-THP- |
| | K(NMeAc)-N-3Pya-Sar-CON(Me)2 |
| 288 | cPEG3aCO-Pen(3)-N(N(Me)2)-T-7MeW-K(NMeAc)-Pen(3)-TzlChmPEG-2Nal- |
| | THP-K(NMeAc)-N-3Pya-Sar-CON(Me)2 |
| 289 | cPEG3aCO-Pen(3)-N(N(Me)2)-T-7MeW-K(NMeAc)-Pen(3)-TzlChmPEG3- |
| | 2Nal-THP-K(NMeAc)-N-3Pya-Sar-CON(Me)2 |
| 290 | cPEG3aCO-Pen(3)-N(N(Me)2)-T-7MeW-K(NMeAc)-Pen(3)-Y(OtzlC1aC8)- |
| | 2Nal-THP-K(NMeAc)-N-3Pya-Sar-CON(Me)2 |
| 291 | cPEG3aCO-Pen(3)-N(N(Me)2)-T-7MeW-K(NMeAc)-Pen(3)-Y(OTzlChC16)- |
| | 2Nal-THP-K(NMeAc)-N-3Pya-Sar-CON(Me)2 |
| 292 | cPEG3aCO-Pen(3)-N(N(Me)2)-T-7MeW-K(NMeAc)-Pen(3)- |
| | Diazabiclyclooctane6F-2Nal-THP-K(NMeAc)-N-3Pya-Sar-CON(Me)2 |
| 293 | cPEG3aCO-Pen(3)-N(N(Me)2)-T-7MeW-K(NMeAc)-Pen(3)-TMA6F-2Nal- |
| | THP-K(NMeAc)-N-3Pya-Sar-CON(Me)2 |
| 294 | cPEG3aCO-Pen(3)-N(N(me)2)-T-7(3NAcPh)W-K(NMeAc)-Pen(3)-TMAPF- |
| | 2Nal-THP-K(NMeAc)-N-3Pya-Sar-CON(Me)2 |
| 295 | cPEG3aCO-Pen(3)-N(N(Me)2)-T-7MeW-K(NMeAc)-Pen(3)-TMA8F-2Nal- |
| | THP-K(NMeAc)-N-3Pya-Sar-CON(Me)2 |
| 297 | cPEG3aCO-Pen(3)-N(N(Me)2)-T-7MeW-K(NMeAc)-Pen(3)-NPyPEG3F-2Nal- |
| | THP-K(NMeAc)-N-3Pya-Sar-CON(Me)2 |
| 298 | cPEG3aCO-Pen(3)-N(N(Me)2)-T-7MeW-K(NMeAc)-Pen(3)-dFPPEG3F-2Nal- |
| | THP-K(NMeAc)-N-3Pya-Sar-CON(Me)2 |
| 301 | cPEG3aCO-Pen(3)-N(N(Me)2)-T-7MeW-K(NMeAC)-Pen(3)-TMAPF-2Nal- |
| | THP-Dab(NMeAc)-N-3Pya-Sar-CON(Me)2 |
| 302 | cPEG3aCO-Pen(3)-N(N(Me)2)-T-7MeW-K(NMeAc)-Pen(3)-F(4TzlTMA4)- |
| | 2Nal-THP-K(NMeAc)-N-3Pya-Sar-CON(Me)2 |
| 303 | cPEG3aCO-Pen(3)-N(N(Me)2)-T-7MeW-K(NMeAc)-Pen(3)-F(4TzlMME)- |
| | 2Nal-THP-K(NMeAc)-N-3Pya-Sar-CON(Me)2 |
| 304 | cPEG3aCO-Pen(3)-N(N(Me)2)-T-7MeW-K(NMeAc)-Pen(3)-F(4G)-2Nal-THP- |
| | K(NMeAc)-N-3Pya-Sar-CON(Me)2 |
| 305 | cPEG3aCO-Pen(3)-N(N(Me)2)-T-7MeW-K(NMeAc)-Pen(3)-Y(OEOXlMECh)- |
| | 2Nal-THP-K(NMeAc)-N-3Pya-Sar-CON(Me)2 |
| 306 | cPEG3aCO-Pen(3)-N(N(Me)2)-T-7MeW-K(NMeAc)-Pen(3)-Y(OZOXlMECh)- |
| | 2Nal-THP-K(NMeAc)-N-3Pya-Sar-CON(Me)2 |
| 307 | cPEG3aCO-Pen(3)-N(N(Me)2)-T-7MeW-K(NMeAC)-Pen(3)-TMAPF-2Nal- |
| | THP-K(NMeaC)-N-3Pya-NMeK(PEG2PEG2C12)-CONH2 |
| 308 | cPEG3aCO-Pen(3)-N(N(Me)2)-T-7MeW-K(Ac)-Pen(3)-TMAPF-2Nal-THP- |
| | Dab(NMeAc)-N-3Pya-Sar-CON(Me)2 |
| 310 | cPEG3aCO-Pen(3)-N(N(Me)2)-T-7MeW-K(NMeAC)-Pen(3)-TMAPF-2Nal- |
| | THP-Q(N(Me)2)-N-3Pya-Sar-CON(Me)2 |
| 312 | cPEG3aCO-Pen(3)-N(N(Me)2)-T-7MeW-Q(N(Me)2)-Pen(3)-TMAPF-2Nal- |
| | THP-K(NMeAC)-N-3Pya-Sar-CON(Me)2 |
| 313 | cPEG3aCO-Pen(3)-N(N(Me)2)-T-7MeW-K(Ac)-Pen(3)-TMAPF-2Nal-THP- |
| | K(NMeaC)-N-3Pya-NMeK(PEG2PEG2gEC12)-CONH2 |
| 314 | cPEG3aCO-Pen(3)-N(N(Me)2)-T-7MeW-K(NMeAC)-Pen(3)-TMAPF-2Nal- |
| | THP-K(NMeaC)-N-3Pya-NMeK(PEG2PEG2gEC12)-CONH2 |
| 315 | cPEG3aCO-Pen(3)-N(N(Me)2)-T-7MeW-K(NMeAC)-Pen(3)-TMAPF-2Nal- |
| | THP-K(NMeaC)-N-3Pya-NMeK(PEG2PEG2gEC14)-CONH2 |
| 316 | cPEG3aCO-Pen(3)-N(N(Me)2)-T-7MeW-K(NMeAc)-Pen(3)-TMAPF-2Nal- |
| | THP-A-N-3Pya-Sar-CON(Me)2 |
| 318 | MeCO-APEG2Ser(S*)-Pen(3)-N(N(Me)2)-T-7MeW-K(NMeAc)-Pen(3)- |
| | APEG3F-2Nal-THP-K(NMeAc)-N-3Pya-Sar-CON(Me)2 |
| 319 | MeCO-APEG2Ser(R*)-Pen(3)-N(N(Me)2)-T-7MeW-K(NMeAc)-Pen(3)- |
| | APEG3F-2Nal-THP-K(NMeAc)-N-3Pya-Sar-CON(Me)2 |
| 320 | cPEG3aCO-Pen(3)-N(N(Me)2)-T-7MeW-K(NMeAc)-Pen(3)-AEF-2Nal-THP- |
| | K(NMeAc)-N-3Pya-Sar-CON(Me)2 |
| 321 | cPEG3aCO-Pen(3)-N(N(Me)2)-T-7MeW-K(NMeAc)-Pen(3)-AEF(N(Me)2)- |
| | 2Nal-THP-K(NMeAc)-N-3Pya-Sar-CON(Me)2 |
| 322 | C12gEPEG2PEG2CO-hk(Me)3-Pen(3)-N(N(Me)2)-T-7MeW-K(NMeAc)- |
| | Pen(3)-TMAPF-2Nal-THP-K(NMeAc)-N-3Pya-Sar-CON(Me)2 |
| 323 | C12gEPEG2PEG2CO-hk(Me)3-Pen(3)-N(N(Me)2)-T-7MeW- |
| | K(PEG2PEG2gEC12)-Pen(3)-TMAPF-2Nal-THP-K(NMeAc)-N-3Pya-Sar- |
| | CON(Me)2 |
| 324 | C14gEPEG2PEG2CO-hk(Me)3-Pen(3)-N(N(Me)2)-T-7MeW-K(NMeAc)- |
| | Pen(3)-TMAPF-2Nal-THP-K(NMeAc)-N-3Pya-Sar-CON(Me)2 |
| 325 | C14gEPEG2PEG2CO-hk(Me)3-Pen(3)-N(N(Me)2)-T-7MeW- |
| | K(PEG2PEG2gEC14)-Pen(3)-TMAPF-2Nal-THP-K(NMeAc)-N-3Pya-Sar- |
| | CON(Me)2 |
| 326 | cPEG3aCO-Pen(3)-N(N(Me)2)-T-7MeW-K(NMeAc)-Pen(3)-TMAPF-2Nal- |
| | THP-K(NMeAc)-N-3Pya-Sar-CONH2 |
| 327 | cPEG3aCO-Pen(3)-N(N(Me)2)-T-7MeW-K(NMeAc)-Pen(3)-TMAPF-2Nal- |
| | THP-Cit-N-3Pya-Sar-CON(Me)2 |
| 329 | cPEG3aCO-Pen(3)-N(N(Me)2)-T-7MeW-K(Me)3-Pen(3)-TMAPF-2Nal-THP- |
| | K(NMeAc)-N-3Pya-Sar-CON(Me)2 |
| 330 | cPEG3aCO-Pen(3)-N(N(Me)2)-T-7MeW-K(NMeAc)-Pen(3)-TMAPF-2nal- |
| | Acpx-K(NMeAc)-N-3Pya-Sar-CON(Me)2 |
| 331 | cPEG3aCO-Pen(3)-N(N(Me)2)-T-7MeW-K(NMeAc)-Pen(3)-F(4N3)-2Nal-THP- |
| | K(NMeAc)-N-3Pya-Sar-CON(Me)2 |
| 332 | cPEG3aCO-Pen(3)-N(N(Me)2)-T-7MeW-K(NMeAc)-Pen(3)-F(4TzlTMA1)- |
| | 2Nal-THP-K(NMeAc)-N-3Pya-Sar-CON(Me)2 |
| 333 | cPEG3aCO-Pen(3)-N(N(Me)2)-T-7MeW-K(NMeAc)-Pen(3)-F(4TzlTMA2)- |
| | 2Nal-THP-K(NMeAc)-N-3Pya-Sar-CON(Me)2 |
| 334 | cPEG3aCO-Pen(3)-N(N(Me)2)-T-7MeW-K(NMeAc)-Pen(3)-F(4TzlTMA3)- |
| | 2Nal-THP-K(NMeAc)-N-3Pya-Sar-CON(Me)2 |
| 335 | cPEG3aCO-Pen(3)-N(N(Me)2)-T-7MeW-K(NMeAc)-Pen(3)-F(4TzlTMA5)- |
| | 2Nal-THP-K(NMeAc)-N-3Pya-Sar-CON(Me)2 |
| 336 | cPEG3aCO-Pen(3)-N(N(Me)2)-T-7MeW-K(NMeAc)-Pen(3)-F(4TzlMMo4)- |
| | 2Nal-THP-K(NMeAc)-N-3Pya-Sar-CON(Me)2 |
| 337 | cPEG3aCO-Pen(3)-N(N(Me)2)-T-7MeW-K(NMeAc)-Pen(3)- |
| | F(4TzlDMA4mPEG)-2Nal-THP-K(NMeAc)-N-3Pya-Sar-CON(Me)2 |
| 338 | cPEG3aCO-Pen(3)-N(N(Me)2)-T-7MeW-K(NMeAc)-Pen(3)-hFTMAPF-2Nal- |
| | THP-K(NMeAc)-N-3Pya-Sar-CON(Me)2 |
| 339 | cPEG3aCO-Pen(3)-N(N(Me)2)-T-7MeW-K(NMeAc)-Pen(3)-TMAPF-2nal- |
| | Achx-K(NMeAc)-N-3Pya-Sar-CON(Me)2 |
| 340 | cPEG3aCO-Pen(3)-N(N(Me)2)-T-7MeW-K(NMeAc)-Pen(3)-TMAPF-2Nal-Chg- |
| | K(NMeAc)-N-3Pya-Sar-CON(Me)2 |
| 341 | cPEG3aCO-Pen(3)-N(N(Me)2)-T-7MeW-K(NMeAc)-Pen(3)-TMAPF-2Nal-Aib- |
| | K(NMeAc)-N-3Pya-Sar-CON(Me)2 |
| 343 | 5cpaCO-Pen(3)-N(N(Me)2)-T-7MeW-K(NMeAc)-Pen(3)-TMAPF-2Nal-THP- |
| | K(NMeAc)-N-3Pya-Sar-CON(Me)2 |
| 344 | MeCO-hk(Me)3-Pen(3)-N(N(Me)2)-T-7MeW-K(NMeAc)-Pen(3)-TMAPF- |
| | 2Nal-THP-K(NMeAc)-N-3Pya-Sar-CON(Me)2 |
| 345 | MeCO-r-Pen(3)-N(N(Me)2)-T-7MeW-K(NMeAc)-Pen(3)-TMAPF-2Nal-THP- |
| | K(NMeAc)-N-3Pya-Sar-CON(Me)2 |
| 346 | cPEG3aCO-Pen(3)-N(N(Me)2)-T-7MeW-Cit-Pen(3)-TMAPF-2Nal-THP- |
| | K(NMeAc)-N-3Pya-Sar-CON(Me)2 |
| 347 | cPEG3aCO-k(PEG2PEG2gEC14)-Pen(3)-N(N(Me)2)-T-7MeW-K(Ac)-Pen(3)- |
| | TMAPF-2Nal-THP-K(NMeac)-N-3Pya-NMeK(PEG2PEG2gEC14)-CONH2 |
| 348 | cPEG3aCO-k(PEG2PEG2gEC12)-Pen(3)-N(N(Me)2)-T-7MeW-K(Ac)-Pen(3)- |
| | TMAPF-2Nal-THP-K(NMeac)-N-3Pya-NMeK(PEG2PEG2gEC12)-CONH2 |
| 350 | C14gEPEG2PEG2CO-Pen(3)-N(N(Me)2)-T-7MeW-K(Ac)-Pen(3)-TMAPF-2Nal- |
| | THP-K(NMeac)-N-3Pya-NMeK(PEG2PEG2gEC14)-CONH2 |
| 351 | cPEG3aCO-Pen(3)-N(N(Me)2)-T-7MeW-K(Ac)-Pen(3)-TMAPF-2Nal-THP- |
| | K(PEG2PEG2gEC14)-N-3Pya-NMeK(PEG2PEG2gEC14)-CONH2 |
| 352 | cPEG3aCO-Pen(3)-N(N(Me)2)-T-7MeW-K(PEG2PEG2gEC12)-Pen(3)-TMAPF- |
| | 2Nal-THP-K(NMeac)-N-3Pya-NMeK(PEG2PEG2gEC12)-CONH2 |
| 353 | cPEG3aCO-Pen(3)-N(N(Me)2)-T-7MeW-K(Ac)-Pen(3)-TMAPF-2Nal-THP- |
| | K(PEG2PEG2gEC12)-N-3Pya-NMeK(PEG2PEG2gEC12)-CONH2 |
| 354 | C12gEPEG2PEG2CO-Pen(3)-N(N(Me)2)-T-7MeW-K(Ac)-Pen(3)-TMAPF-2Nal- |
| | THP-K(NMeac)-N-3Pya-NMeK(PEG2PEG2gEC12)-CONH2 |
| 355 | cPEG3aCO-Pen(3)-N(N(Me)2)-T-7MeW-K(PEG2PEG2gEC14)-Pen(3)-TMAPF- |
| | 2Nal-THP-K(NMeac)-N-3Pya-NMeK(PEG2PEG2gEC14)-CONH2 |
| 358 | cPEG3aCO-Pen(3)-N(N(Me)2)-t-7MeW-Dab(NMeAc)-Pen(3)-TMAPF-2Nal- |
| | THP-K(NMeAc)-N-3Pya-Sar-CON(Me)2 |
| 359 | cPEG3aCO-Pen(3)-N(N(Me)2)-T-7MeW-K(Ac)-Pen(3)-TMAPF-2Nal-THP- |
| | K(NMeac)-N-3Pya-NMeK(PEG2PEG2C14)-CONH2 |
| 360 | cPEG3aCO-Pen(3)-N(N(Me)2)-T-7MeW-K(Ac)-Pen(3)-TMAPF-2Nal-THP- |
| | K(NMeac)-N-3Pya-NMeK(PEG2PEG6gEC12)-CONH2 |
| 361 | cPEG3aCO-Pen(3)-N(N(Me)2)-T-7MeW-K(Ac)-Pen(3)-TMAPF-2Nal-THP- |
| | K(NMeac)-N-3Pya-NMeK(PEG2PEG6gEC14)-CONH2 |
| 362 | cPEG3aCO-Pen(3)-N(N(Me)2)-t-7MeW-Dab(NMeAc)-Pen(3)-TMAPF-2Nal- |
| | THP-K(NMeAc)-N-3Pya-Sar-CONH2 |
| 363 | cPEG3aCO-Pen(3)-N(N(Me)2)-T-7MeW-K(NMeAc)-Pen(3)-APEG3F-2Nal- |
| | THP-K(NMeAc)-N-3Pya-Sar-CONH2 |
| 366 | C12gEPEG2PEG2CO-APEG2Ser(S*)-Pen(3)-N(N(Me)2)-T-7MeW-K(NMeAc)- |
| | Pen(3)-APEG3F-2Nal-THP-K(NMeAc)-N-3Pya-Sar-CON(Me)2 |
| 367 | C14gEPEG2PEG2CO-APEG2Ser(S*)-Pen(3)-N(N(Me)2)-T-7MeW-K(NMeAc)- |
| | Pen(3)-APEG3F-2Nal-THP-K(NMeAc)-N-3Pya-Sar-CON(Me)2 |
| 368 | C12gEPEG2PEG2CO-APEG2Ser(S*)-Pen(3)-N(N(Me)2)-T-7MeW- |
| | K(PEG2PEG2gEC12)-Pen(3)-APEG3F-2Nal-THP-K(NMeAc)-N-3Pya-Sar- |
| | CON(Me)2 |
| 369 | C14gEPEG2PEG2CO-APEG2Ser(S*)-Pen(3)-N(N(Me)2)-T-7MeW- |
| | K(PEG2PEG2gEC14)-Pen(3)-APEG3F-2Nal-THP-K(NMeAc)-N-3Pya-Sar- |
| | CON(Me)2 |
| 370 | cPEG3aCO-k(PEG2PEG6gEC12)-Pen(3)-N(N(Me)2)-T-7MeW-K(Ac)-Pen(3)- |
| | TMAPF-2Nal-THP-K(NMeac)-N-3Pya-NMeK(PEG2PEG6gEC12)-CONH2 |
| 372 | cPEG3aCO-Pen(3)-N(N(Me)2)-T-7MeW-K(Ac)-Pen(3)-TMAPF-2Nal-THP- |
| | K(NMeac)-N-3Pya-NMeK(PEG2PEG2K(PEG2PEG2gEC12)2)-CONH2 |
| 373 | cPEG3aCO-Pen(3)-N(N(Me)2)-T-7MeW-K(Ac)-Pen(3)-TMAPF-2Nal-THP- |
| | K(PEG2PEG2PEG2gEC12))-N-3Pya-NMeK(PEG2PEG2PEG2gEC12)-CONH2 |
| 375 | C12gEPEG2PEG2CO-hk(Me)3-Pen(3)-N(N(Me)2)-T-7MeW-K(NMeAc)- |
| | Pen(3)-TMAPF-2Nal-THP-K(PEG2PEG2gEC12)-N-3Pya-Sar-CON(Me)2 |
| 376 | C14gEPEG2PEG2CO-hk(Me)3-Pen(3)-N(N(Me)2)-T-7MeW-K(NMeAc)- |
| | Pen(3)-TMAPF-2Nal-THP-K(PEG2PEG2gEC14)-N-3Pya-Sar-CON(Me)2 |
| 377 | C12gEPEG2PEG2CO-hk(Me)3-Pen(3)-N(N(Me)2)-T-7MeW-K(NMeAc)- |
| | Pen(3)-TMAPF-2Nal-K(PEG2PEG2gEC12)-N-3Pya-Sar-CON(Me)2 |
| 378 | cPEG3aCO-k(PEG2PEG2gEC12)-Pen(3)-N(N(Me)2)-T-7MeW-K(NMeAc)- |
| | Pen(3)-TMAPF-2Nal-THP-K(NMeAc)-N-3Pya-Sar-CON(Me)2 |
| 379 | cPEG3aCO-k(PEG2PEG2gEC14)-Pen(3)-N(N(Me)2)-T-7MeW-K(NMeAc)- |
| | Pen(3)-TMAPF-2Nal-THP-K(NMeAc)-N-3Pya-Sar-CON(Me)2 |
| 382 | cPEG3aCO-k(PEG2PEG2gEC12)-Pen(3)-N(N(Me)2)-T-7MeW- |
| | K(PEG2PEG2gEC12)-Pen(3)-TMAPF-2Nal-THP-K(NMeAc)-N-3Pya-Sar- |
| | CON(Me)2 |
| 384 | cPEG3aCO-Pen(3)-N(N(Me)2)-T-7MeW-K(cPEG3a)-Pen(3)-TMAPF-2Nal- |
| | THP-K(NMeAc)-N-3Pya-Sar-CON(Me)2 |
| 385 | C12gEPEG2PEG2CO-k(PEG2PEG2gEC12)-Pen(3)-N(N(Me)2)-t-7MeW- |
| | Dab(NMeAc)-Pen(3)-TMAPF-2Nal-THP-K(NMeAc)-N-3Pya-Sar-CON(Me)2 |
| 386 | C14gEPEG2PEG2CO-k(PEG2PEG2gEC14)-Pen(3)-N(N(Me)2)-t-7MeW- |
| | Dab(NMeAc)-Pen(3)-TMAPF-2Nal-THP-K(NMeAc)-N-3Pya-Sar-CON(Me)2 |
| 390 | cPEG2gCO-Pen(3)-N(N(Me)2)-T-7MeW-K(NMeAc)-Pen(3)-TMAPF-2Nal- |
| | THP-K(NMeAc)-N-3Pya-Sar-CON(Me)2 |
| 391 | cPEG3gCO-Pen(3)-N(N(Me)2)-T-7MeW-K(NMeAc)-Pen(3)-TMAPF-2Nal- |
| | THP-K(NMeAc)-N-3Pya-Sar-CON(Me)2 |
| 392 | cPEG3aCO-Pen(3)-N(N(Me)2)-T-7MeW-K(4cpg)-Pen(3)-TMAPF-2Nal-THP- |
| | K(NMeAc)-N-3Pya-Sar-CON(Me)2 |
| 394 | cPEG3aCO-k(PEG2PEG2gEC12)-Pen(3)-N(N(Me)2)-T-7MeW-K(NMeAc)- |
| | Pen(3)-TMAPF-2Nal-THP-K(PEG2PEG2gEC12)-N-3Pya-Sar-CON(Me)2 |
| 395 | cPEG3aCO-k(PEG2PEG2gEC14)-Pen(3)-N(N(Me)2)-T-7MeW-K(NMeAc)- |
| | Pen(3)-TMAPF-2Nal-THP-K(PEG2PEG2gEC14)-N-3Pya-Sar-CON(Me)2 |
| 399 | cPEG3aCO-Pen(3)-N(N(Me)2)-T-7MeW-K(PEG2PEG2gEC14)-Pen(3)-TMAPF- |
| | 2Nal-THP-K(NMeAc)-N-3Pya-Sar-CON(Me)2 |
| 400 | cPEG3aCO-Pen(3)-N(N(Me)2)-T-7MeW-K(PEG2PEG2gEC12)-Pen(3)-TMAPF- |
| | 2Nal-THP-K(PEG2PEG2gEC12)-N-3Pya-Sar-CON(Me)2 |
| 401 | cPEG3aCO-Pen(3)-N(N(Me)2)-T-7MeW-K(NMeAc)-Pen(3)-TMAPF-2Nal- |
| | THP-K(PEG2PEG2gEC12)-N-3Pya-Sar-CON(Me)2 |
| 402 | cPEG3aCO-Pen(3)-N(N(Me)2)-T-7MeW-K(NMeAc)-Pen(3)-TMAPF-2Nal- |
| | THP-K(PEG2PEG2gEC14)-N-3Pya-Sar-CON(Me)2 |
| 403 | 4cpgCO-Pen(3)-N(N(Me)2)-T-7MeW-K(NMeAc)-Pen(3)-TMAPF-2Nal-THP- |
| | K(NMeAc)-N-3Pya-Sar-CON(Me)2 |
| 404 | cPEG3aCO-k(PEG2PEG2PEG2PEG2gEC12)-Pen(3)-N(N(Me)2)-T-7MeW- |
| | K(Ac)-Pen(3)-TMAPF-2Nal-THP-K(NMeac)-N-3Pya- |
| | NMeK(PEG2PEG2PEG2PEG2gEC12)-CONH2 |
| 405 | cPEG3aCO-Pen(3)-N(N(Me)2)-T-7MeW-K(NMeAc)-Pen(3)-GPEG3F-2Nal- |
| | THP-K(NMeAc)-N-3Pya-Sar-CON(Me)2 |
| 406 | cPEG3gCO-Pen(3)-N(N(Me)2)-T-7MeW-K(NMeAc)-Pen(3)-APEG3F-2Nal- |
| | THP-K(NMeAc)-N-3Pya-Sar-CON(Me)2 |
| 407 | cPEG3aCO-Pen(3)-N(N(Me)2)-T-7MeW-K(Ac)-Pen(3)-TMAPF-2Nal-THP- |
| | K(NMeac)-N-3Pya-NMeK(SP6PEG2PEG2C12)-CONH2 |
| 408 | cPEG3aCO-Pen(3)-N(N(Me)2)-T-7MeW-K(Ac)-Pen(3)-TMAPF-2Nal-THP- |
| | K(NMeac)-N-3Pya-NMeK(SP6PEG2PEG2gEC12)-CONH2 |
| 409 | cPEG3aCO-Pen(3)-N(N(Me)2)-T-7MeW-K(Ac)-Pen(3)-TMAPF-2Nal-THP- |
| | K(NMeac)-N-3Pya-NMeK(PEG2PEG2K(PEG2PEG2PEG2PEG2gEC12)2)- |
| | CONH2 |
| 410 | cPEG3aCO-Pen(3)-N(N(Me)2)-T-7MeW-K(PEG2PEG2gEC14)-Pen(3)-TMAPF- |
| | 2Nal-THP-K(PEG2PEG2gEC14)-N-3Pya-Sar-CON(Me)2 |
| 413 | cPEG2gCO-Pen(3)-N(N(Me)2)-T-7MeW-K(NMeAc)-Pen(3)-APEG3F-2Nal- |
| | THP-K(NMeAc)-N-3Pya-Sar-CON(Me)2 |
| 414 | cPEG3aCO-Pen(3)-N(N(Me)2)-t-7MeW-Dap(NMeAc)-Pen(3)-TMAPF-2Nal- |
| | THP-K(NMeAc)-N-3Pya-Sar-CON(Me)2 |
| 415 | cPEG3aCO-Pen(3)-N(N(Me)2)-T-7MeW-K(Ac)-Pen(3)-TMAPF-2Nal-THP- |
| | Dap(NMeAc)-N-3Pya-Sar-CON(Me)2 |
| 419 | cPEG3aCO-Pen(3)-N(N(Me)2)-T-7MeW-K(NMeAc)-Pen(3)-APEG3F-2Nal- |
| | THP-Dap(NMeAc)-N-3Pya-Sar-CON(Me)2 |
| 421 | cPEG3aCO-Pen(3)-N(N(me)2)-T-7(3NAcPh)W-K(NMeac)-Pen(3)-MMoEF- |
| | 2Nal-THP-K(NMeAc)-N-3Pya-Sar-CON(Me)2 |
| 466 | cPEG3aCO-Pen(3)-N(N(Me)2)-T-7MeW-K(NMeAc)-Pen(3)-APEG3F-2Nal- |
| | THP-A-N-3Pya-Sar-CON(Me)2 |
| 467 | cPEG3aCO-Pen(3)-N(N(Me)2)-T-7MeW-K(NMeAc)-Pen(3)-APEG3F-2Nal- |
| | THP-L-N-3Pya-Sar-CON(Me)2 |
| 469 | cPEG3aCO-Pen(3)-N(N(Me)2)-T-7MeW-K(NMeAc)-Pen(3)-APEG3F-2Nal- |
| | THP-F-N-3Pya-Sar-CON(Me)2 |
| 470 | cPEG3aCO-Pen(3)-N(N(Me)2)-T-7MeW-K(NMeAc)-Pen(3)-APEG3F-2Nal- |
| | THP-W-N-3Pya-Sar-CON(Me)2 |
| 472 | cPEG3aCO-Pen(3)-N(N(Me)2)-T-7MeW-K(NMeAc)-Pen(3)-Y(OTzlTMA4)- |
| | 2Nal-THP-K(NMeAc)-N-3Pya-Sar-CON(Me)2 |

TABLE 1C
Compounds

| SEQ ID | Harmonized Sequences txt |
|---|---|
| 82 | cPEG3aCO-Pen(3)-N-T-7MeW-K(Ac)-Pen(3)-AEF-2Nal-THP-E-N-3Pya-Sar- |
| | CONH2 |
| 90 | cPEG3aCO-Pen(3)-N-T-7MeW-K(Ac)-Pen(3)-AEF-2Nal-THP-K(Ac)-N-3Pya- |
| | Sar-CONH2 |
| 137 | cPEG3aCO-Pen(3)-N-T-7MeW-Q(N(Me)2)-Pen(3)-AEF-2Nal-THP- |
| | Q(N(Me)2)-N-3Pya-Sar-CONH2 |
| 139 | cPEG3aCO-Pen(3)-N(N(Me)2)-T-7MeW-Q(N(Me)2)-Pen(3)-AEF-2Nal-THP- |
| | Q(N(Me)2)-N-3Pya-Sar-CON(Me)2 |
| 142 | cPEG3aCO-Pen(3)-N(N(Me)2)-T-7MeW-AIB-Pen(3)-AEF-2Nal-THP-AIB-N- |
| | 3Pya-Sar-CON(Me)2 |
| 147 | cPEG3aCO-Pen(3)-N(N(Me)2)-T-7MeW-Q(N(Me)2)-Pen(3)-AEF-2Nal-THP- |
| | Q(N(Me)2)-N-3Pya-Sar-CONH2 |
| 149 | cPEG3aCO-Pen(3)-N(N(Me)2)-T-7MeW-K(NMeAc)-Pen(3)-AEF-2Nal-THP- |
| | K(Ac)-N-3Pya-Sar-CONH2 |
| 150 | cPEG3aCO-Pen(3)-N(N(Me)2)-T-7MeW-K(NMeAc)-Pen(3)-AEF-2Nal-THP- |
| | Q(N(Me)2)-N-3Pya-Sar-CONH2 |
| 154 | cPEG3aCO-Pen(3)-N(N(Me)2)-T-7MeW-Q(N(Me)2)-Pen(3)-AEF(N(Me)2)- |
| | 2Nal-THP-Q(N(Me)2)-N-3Pya-Sar-CON(Me)2 |
| 156 | cPEG3aCO-Pen(3)-N-T-7MeW-Q(N(Me)2)-Pen(3)-AEF-2Nal-THP- |
| | Q(N(Me)2)-N-3Pya-Sar-CON(Me)2 |
| 159 | cPEG3aCO-Pen(3)-N(N(Me)2)-T-7MeW-Q(N(Me)2)-Pen(3)-AEF-2Nal-THP- |
| | Dab(NMeAc)-N-3Pya-Sar-CON(Me)2 |
| 160 | cPEG3aCO-Pen(3)-N(N(Me)2)-t-7MeW-Dab(NMeAc)-Pen(3)-AEF-2Nal- |
| | THP-Dab(NMeAc)-N-3Pya-Sar-CON(Me)2 |
| 161 | cPEG3aCO-Pen(3)-n-T-7MeW-K(NMeAc)-Pen(3)-AEF-2Nal-THP-E-N-3Pya- |
| | Sar-CONH2 |
| 162 | cPEG3aCO-Pen(3)-n-T-7MeW-K(NMeAc)-Pen(3)-AEF-2Nal-THP-K(Ac)-N- |
| | 3Pya-Sar-CONH2 |
| 164 | cPEG3aCO-Pen(3)-N(N(Me)2)-T-7MeW-K(NMeAc)-Pen(3)-TMAPF-2Nal- |
| | THP-K(NMeAc)-N-3Pya-Sar-CON(Me)2 |
| 165 | cPEG3aCO-Pen(3)-N(N(Me)2)-T-7MeW-K(NMeAc)-Pen(3)-TMAPF-2Nal- |
| | THP-E-N-3Pya-Sar-CON(Me)2 |
| 167 | cPEG3aCO-Pen(3)-n-T-7MeW-K(NMeAc)-Pen(3)-AEF-2Nal-THP-K(NMeAc)- |
| | N-3Pya-Sar-CONH2 |
| 168 | cPEG3aCO-Pen(3)-N-T-7MeW-Q(N(Me)2)-Pen(3)-AEF-2Nal-THP- |
| | K(NMeAc)-N-3Pya-Sar-CONH2 |
| 169 | cPEG3aCO-Pen(3)-N(N(Me)2)-T-7MeW-K(NMeAc)-Pen(3)-AEF-2Nal-THP- |
| | K(NMeAc)-N-3Pya-Sar-CONH2 |
| 171 | cPEG3aCO-Pen(3)-N(N(Me)2)-t-7MeW-Dab(NMeAc)-Pen(3)-AEF-2Nal- |
| | THP-K(NMeAc)-N-3Pya-Sar-CONH2 |
| 174 | cPEG3aCO-Pen(3)-n-T-7MeW-K(NMeAc)-Pen(3)-AEF-2Nal-THP- |
| | Dab(NMeAc)-N-3Pya-Sar-CONH2 |
| 176 | cPEG3aCO-Pen(3)-N(N(Me)2)-t-7MeW-Dab(NMeAc)-Pen(3)-AEF-2Nal- |
| | THP-E-N-3Pya-Sar-CON(Me)2 |
| 177 | cPEG3aCO-Pen(3)-N(N(Me)2)-T-7MeW-K(NMeAc)-Pen(3)-AEF-2Nal-THP- |
| | Dab(NMeAc)-N-3Pya-Sar-CON(Me)2 |
| 178 | cPEG3aCO-Pen(3)-N-T-7MeW-Q(N(Me)2)-Pen(3)-AEF-2Nal-THP- |
| | Dab(NMeAc)-N-3Pya-Sar-CONH2 |
| 179 | cPEG3aCO-Pen(3)-N(N(Me)2)-T-7MeW-K(NMeAc)-Pen(3)-AEF-2Nal- |
| | diFCpx-Dab(NMeAc)-N-3Pya-Sar-CON(Me)2 |
| 180 | cPEG3aCO-Pen(3)-N(N(Me)2)-T-7MeW-K(NMeAc)-Pen(3)-AEF-2Nal- |
| | diFCpx-Dab(NMeAc)-N-3Pya-Sar-CON(Me)2 |
| 181 | cPEG3aCO-Pen(3)-N(N(Me)2)-T-7MeW-K(NMeAc)-Pen(3)-APEG3F-2Nal- |
| | THP-K(NMeAc)-N-3Pya-Sar-CON(Me)2 |
| 184 | cPEG3aCO-Pen(3)-N(N(Me)2)-T-7MeW-K(NMeAc)-Pen(3)-APEG3F-2Nal- |
| | THP-E-N-3Pya-Sar-CON(Me)2 |
| 187 | cPEG3aCO-Pen(3)-N(N(Me)2)-T-7MeW-K(NMeAc)-Pen(3)-4DMPEF-2Nal- |
| | THP-K(NMeAc)-N-3Pya-Sar-CON(Me)2 |
| 188 | cPEG3aCO-Pen(3)-n-T-7MeW-K(NMeAc)-Pen(3)-TMAPF-2Nal-THP- |
| | K(NMeAc)-N-3Pya-Sar-CONH2 |
| 191 | cPEG3aCO-Pen(3)-N(N(Me)2)-t-7MeW-Dab(NMeAc)-Pen(3)-AEF-2Nal- |
| | THP-Dab(NMeAc)-N-3Pya-Sar-CONH(PEG3a) |
| 193 | cPEG3aCO-Pen(3)-N(N(Me)2)-T-7MeW-K(NMeAc)-Pen(3)-4DMPzEF-2Nal- |
| | THP-K(NMeAc)-N-3Pya-Sar-CON(Me)2 |
| 195 | cPEG3aCO-Pen(3)-N-T-7MeW-K(Ac)-Pen(3)-APEG3F-2Nal-THP-K(Ac)-N- |
| | 3Pya-Sar-CONH2 |
| 196 | cPEG3aCO-Pen(3)-N(N(Me)2)-T-7MeW-Dab(NMecPEG3a)-Pen(3)-AEF- |
| | 2 Nal-THP-Dab(NMeAc)-N-3Pya-Sar-CON(Me)2 |
| 198 | cPEG3aCO-Pen(3)-N(N(Me)2)-T-7MeW-K(NMeac)-Pen(3)-MMoEF-2Nal- |
| | THP-K(NMeAc)-N-3Pya-Sar-CON(Me)2 |
| 199 | cPEG3aCO-Pen(3)-N(N(Me)2)-T-7MeW-K(NMeAc)-Pen(3)-APEG2F-2Nal- |
| | THP-K(NMeAc)-N-3Pya-Sar-CON(Me)2 |
| 201 | cPEG3aCO-Pen(3)-n-T-7MeW-K(NMeAc)-Pen(3)-APEG3F-2Nal-THP- |
| | K(NMeAc)-N-3Pya-Sar-CONH2 |
| 202 | cPEG3aCO-Pen(3)-N(N(Me)2)-T-7MeW-K(NMeAc)-Pen(3)-DMPMF-2Nal- |
| | THP-K(NMeAc)-N-3Pya-Sar-CON(Me)2 |
| 203 | cPEG3aCO-Pen(3)-N(N(Me)2)-T-7MeW-K(NMeAc)-Pen(3)-AEF(BisMEP))- |
| | 2Nal-THP-K(NMeAc)-N-3Pya-Sar-CON(Me)2 |
| 206 | cPEG3aCO-Pen(3)-N(N(Me)2)-T-7MeW-K(NMeAc)-Pen(3)-AEF(NsCh)-2Nal- |
| | THP-K(NMeAc)-N-3Pya-Sar-CON(Me)2 |
| 207 | cPEG3aCO-Pen(3)-N(N(Me)2)-T-7MeW-K(NMeAc)-Pen(3)-AEF(AcCh)-2Nal- |
| | THP-K(NMeAc)-N-3Pya-Sar-CON(Me)2 |
| 208 | cPEG3aCO-Pen(3)-N(N(Me)2)-T-7MeW-K(NMeAc)-Pen(3)- |
| | AEF((Ch)cPEG3a)-2Nal-THP-K(NMeAc)-N-3Pya-Sar-CON(Me)2 |
| 209 | cPEG3aCO-Pen(3)-N(N(Me)2)-T-7MeW-K(NMeAc)-Pen(3)-APEG3F-2Nal- |
| | THP-Dab(NMeAc)-N-3Pya-Sar-CON(Me)2 |
| 210 | cPEG3aCO-Pen(3)-N(N(Me)2)-T-7MeW-K(NMeAc)-Pen(3)-ACHMF-2Nal- |
| | THP-K(NMeAc)-N-3Pya-Sar-CON(Me)2 |
| 211 | cPEG3aCo-Pen(3)-N(NMe2)-T-7MeW-K(NMeAc)-Pen(3)-AEF(NHCh)-2Nal- |
| | THP-K(NMeAc)-N-3Pya-Sar-CON(Me)2 |
| 212 | cPEG3aCO-Pen(3)-N(N(Me)2)-T-7MeW-K(NMeAc)-Pen(3)-APEG3F-2Nal- |
| | THP-Dab(NMeAc)-N-3Pya-Sar-CON(Me)2 |
| 215 | cPEG3aCO-Pen(3)-N(N(Me)2)-T-7MeW-K(NMeAc)-Pen(3)-DMMMF-2Nal- |
| | THP-K(NMeAc)-N-3Pya-Sar-CON(Me)2 |
| 220 | cPEG3aCO-Pen(3)-N(N(Me)2)-T-7MeW-K(NMeAc)-Pen(3)-TMAPF-2Nal- |
| | THP-K(NMeAc)-N-3Pya-Sar-CO(NHPEG3a) |
| 221 | cPEG3aCO-Pen(3)-N(N(Me)2)-T-7MeW-K(NMeAc)-Pen(3)-AEF(BisMEPa)- |
| | 2Nal-THP-K(NMeAc)-N-3Pya-Sar-CON(Me)2Â |
| 222 | cPEG3aCO-Pen(3)-N(N(Me)2)-T-7MeW-K(NMeAc)-Pen(3)-ACHMF-2Nal- |
| | THP-K(NMeAc)-N-3Pya-Sar-CON(Me)2 |
| 223 | cPEG3aCO-Pen(3)-N(N(Me)2)-T-7MeW-K(NMeAc)-Pen(3)-MMPEG3F-2Nal- |
| | THP-K(NMeAc)-N-3Pya-Sar-CON(Me)2 |
| 224 | cPEG3aCO-Pen(3)-N(N(Me)2)-T-7MeW-K(NMeAc)-Pen(3)-MPzPEG3F- |
| | 2Nal-THP-K(NMeAc)-N-3Pya-Sar-CON(Me)2 |
| 226 | cPEG3aCO-Pen(3)-N(N(Me)2)-T-7MeW-K(NMeAc)-Pen(3)-TMA4F-2Nal- |
| | THP-K(NMeAc)-N-3Pya-Sar-CON(Me)2 |
| 227 | cPEG3aCO-Pen(3)-N(N(Me)2)-T-7MeW-K(NMeAc)-Pen(3)-mPEG2TMA4F- |
| | 2Nal-THP-K(NMeAc)-N-3Pya-Sar-CON(Me)2 |
| 228 | cPEG3aCO-Pen(3)-N(N(Me)2)-T-7MeW-K(NMeAc)-Pen(3)-mPEG2TMA2F- |
| | 2Nal-THP-K(NMeAc)-N-3Pya-Sar-CON(Me)2 |
| 229 | cPEG3aCO-Pen(3)-N(N(Me)2)-T-7MeW-K(NMeAc)-Pen(3)-TMA3F-2Nal- |
| | THP-K(NMeAc)-N-3Pya-Sar-CON(Me)2 |
| 230 | cPEG3aCO-Pen(3)-N(N(Me)2)-T-7MeW-K(NMeAc)-Pen(3)-TMA3F-2Nal- |
| | THP-K(NMeAc)-N-3Pya-Sar-CON(Me)2 |
| 231 | cPEG3aCO-Pen(3)-N(N(Me)2)-T-7MeW-K(NMeac)-Pen(3)-NPyEF-2Nal- |
| | THP-K(NMeAc)-N-3Pya-Sar-CON(Me)2 |
| 233 | cPEG3aCO-Pen(3)-N(N(Me)2)-T-7MeW-K(NMeAc)-Pen(3)-APEG3F-2Nal- |
| | THP-K(Ac)-N-3Pya-Sar-CON(Me)2 |
| 234 | cPEG3aCO-Pen(3)-N(N(Me)2)-T-7MeW-K(NMeAc)-Pen(3)-AEF(MePrpa)- |
| | 2Nal-THP-K(NMeAc)-N-3Pya-Sar-CON(Me)2 |
| 236 | cPEG3aCO-Pen(3)-N(N(Me)2)-T-7MeW-K(NMeAc)-Pen(3)-Y(C9OH)-2Nal- |
| | THP-K(NMeAc)-N-3Pya-Sar-CON(Me)2 |
| 237 | cPEG3aCO-Pen(3)-N(N(Me)2)-T-7MeW-K(NMeAc)-Pen(3)- |
| | AEF(NMePEG2a)-2Nal-THP-K(NMeAc)-N-3Pya-Sar-CON(Me)2 |
| 238 | cPEG3aCO-Pen(3)-N(N(Me)2)-T-7MeW-K(NMeAc)-Pen(3)-AEF(PEG2a)- |
| | 2Nal-THP-K(NMeAc)-N-3Pya-Sar-CON(Me)2 |
| 239 | cPEG3aCO-Pen(3)-N(N(Me)2)-T-7MeW-K(NMeAc)-pen(3)- |
| | AEF(NMe2mPEG3)-2Nal-THP-K(NMeAc)-N-3Pya-Sar-CON(Me)2 |
| 240 | cPEG3aCO-Pen(3)-n-T-7MeW-K(NMeAc)-Pen(3)-APEG3F-2Nal-THP- |
| | K(NMeAc)-N-3Pya-Sar-CON(Me)2 |
| 241 | cPEG3aCO-Pen(3)-N(N(Me)2)-T-7MeW-K(NMeAc)-Pen(3)- |
| | AEF(NMeBismPEG3)-2Nal-THP-K(NMeAc)-N-3Pya-Sar-CON(Me)2 |
| 242 | cPEG3aCO-Pen(3)-N(N(Me)2)-T-7MeW-K(NMeAc)-Pen(3)-YC8COPip-2Nal- |
| | THP-K(NMeAc)-N-3Pya-Sar-CON(Me)2 |
| 243 | cPEG3aCO-Pen(3)-N(N(Me)2)-T-7MeW-K(Ac)-Pen(3)-APEG3F-2Nal-THP- |
| | K(NMeAc)-N-3Pya-Sar-CON(Me)2 |
| 245 | cPEG3aCO-Pen(3)-N(N(Me)2)-T-7MeW-APEG2Ser-Pen(3)-AEF-2Nal-THP- |
| | K(NMeAc)-N-3Pya-Sar-CON(Me)2 |
| 246 | cPEG3aCO-Pen(3)-N(N(Me)2)-T-7MeW-APEG2Ser(R*)-Pen(3)-AEF-2Nal- |
| | THP-K(NMeAc)-N-3Pya-Sar-CON(Me)2 |
| 247 | cPEG3aCO-Pen(3)-N(N(Me)2)-T-7MeW-APEG2Ser(S*)-Pen(3)-TMAPF- |
| | 2Nal-THP-K(NMeAc)-N-3Pya-Sar-CON(Me)2 |
| 248 | cPEG3aCO-Pen(3)-N(N(Me)2)-T-7MeW-APEG2Ser(R*)-Pen(3)-TMAPF- |
| | 2Nal-THP-K(NMeAc)-N-3Pya-Sar-CON(Me)2 |
| 254 | cPEG3aCO-Pen(3)-N(N(Me)2)-T-7MeW-K(NMeAc)-Pen(3)- |
| | YC8CO(NHPEG3a)-2Nal-THP-K(NMeAc)-N-3Pya-Sar-CON(Me)2 |
| 261 | cPEG3aCO-Pen(3)-N(N(Me)2)-T-7MeW-K(NMeAc)-pen(3)-AEF(NMe3)- |
| | 2Nal-THP-K(NMeAc)-N-3Pya-Sar-CON(Me)2 |
| 262 | cPEG3aCO-Pen(3)-N(N(Me)2)-T-7MeW-K(NMeAc)-Pen(3)-MTASF-2Nal- |
| | THP-K(NMeAc)-N-3Pya-Sar-CON(Me)2 |
| 263 | cPEG3aCO-Pen(3)-N(N(Me)2)-T-7MeW-K(NMeAc)-Pen(3)-TBAPEG3F-2Nal- |
| | THP-K(NMeAc)-N-3Pya-Sar-CON(Me)2 |
| 264 | cPEG3aCO-Pen(3)-N(N(Me)2)-T-7MeW-K(NMeAc)-Pen(3)-AEF(aPEG2a)- |
| | 2Nal-THP-K(NMeAc)-N-3Pya-Sar-CON(Me)2 |
| 265 | cPEG3aCO-Pen(3)-N(N(Me)2)-T-7MeW-K(NMeAc)-Pen(3)- |
| | AEF(BisPEG2a)(RS)-2Nal-THP-K(NMeAc)-N-3Pya-Sar-CON(Me)2 |
| 266 | cPEG3aCO-Pen(3)-N(N(Me)2)-T-7MeW-K(NMeAc)-Pen(3)- |
| | AEF(BisPEG2a)(S*)-2Nal-THP-K(NMeAc)-N-3Pya-Sar-CON(Me)2 |
| 269 | cPEG3aCO-Pen(3)-N(N(Me)2)-T-7MeW-K(NMeAc)-Pen(3)-DMTASF-2Nal- |
| | THP-K(NMeAc)-N-3Pya-Sar-CON(Me)2 |
| 271 | cPEG3aCO-Pen(3)-N(N(Me)2)-T-7MeW-K(NMeAc)-Pen(3)-morfTMA4F- |
| | 2Nal-THP-K(NMeAc)-N-3Pya-Sar-CON(Me)2 |
| 272 | cPEG3aCO-Pen(3)-N(N(Me)2)-T-7MeW-K(NMeAc)-Pen(3)-mPEG3TMA4F- |
| | 2Nal-THP-K(NMeAc)-N-3Pya-Sar-CON(Me)2 |
| 273 | cPEG3aCO-Pen(3)-N(N(Me)2)-T-7MeW-K(NMeAc)-Pen(3)- |
| | PiperazinequatF-2Nal-THP-K(NMeAc)-N-3Pya-Sar-CON(Me)2 |
| 274 | cPEG3aCO-Pen(3)-N(N(Me)2)-T-7MeW-K(NMeac)-Pen(3)-MMoPF-2Nal- |
| | THP-K(NMeAc)-N-3Pya-Sar-CON(Me)2 |
| 277 | cPEG3aCO-Pen(3)-N(N(Me)2)-T-7MeW-K(NMeAc)-Pen(3)-AEF(SPD)-2Nal- |
| | THP-K(NMeAc)-N-3Pya-Sar-CON(Me)2 |
| 283 | cPEG3aCO-Pen(3)-N(N(Me)2)-T-7MeW-K(NMeAc)-Pen(3)- |
| | Y(OTzlChmPEG3)-2Nal-THP-K(NMeAc)-N-3Pya-Sar-CON(Me)2 |
| 284 | cPEG3aCO-Pen(3)-N(N(Me)2)-T-7MeW-K(NMeAc)-Pen(3)-Y(OTzlTMA4)- |
| | 2Nal-THP-K(NMeAc)-N-3Pya-Sar-CON(Me)2 |
| 285 | cPEG3aCO-Pen(3)-N(N(Me)2)-T-7MeW-K(NMeAc)-Pen(3)-Y(OTzlChmPEG)- |
| | 2Nal-THP-K(NMeAc)-N-3Pya-Sar-CON(Me)2 |
| 286 | cPEG3aCO-Pen(3)-N(N(Me)2)-T-7MeW-K(NMeAc)-Pen(3)-Y(OTzlCh)-2Nal- |
| | THP-K(NMeAc)-N-3Pya-Sar-CON(Me)2 |
| 287 | cPEG3aCO-Pen(3)-N(N(Me)2)-T-7MeW-K(NMeAc)-Pen(3)-Tzl(Ch)-2Nal- |
| | THP-K(NMeAc)-N-3Pya-Sar-CON(Me)2 |
| 288 | cPEG3aCO-Pen(3)-N(N(Me)2)-T-7MeW-K(NMeAc)-Pen(3)-TzlChmPEG- |
| | 2Nal-THP-K(NMeAc)-N-3Pya-Sar-CON(Me)2 |
| 289 | cPEG3aCO-Pen(3)-N(N(Me)2)-T-7MeW-K(NMeAc)-Pen(3)-TzlChmPEG3- |
| | 2Nal-THP-K(NMeAc)-N-3Pya-Sar-CON(Me)2 |
| 290 | cPEG3aCO-Pen(3)-N(N(Me)2)-T-7MeW-K(NMeAc)-Pen(3)-Y(OtzlC1aC8)- |
| | 2Nal-THP-K(NMeAc)-N-3Pya-Sar-CON(Me)2 |
| 291 | cPEG3aCO-Pen(3)-N(N(Me)2)-T-7MeW-K(NMeAc)-Pen(3)-Y(OTzlChC16)- |
| | 2Nal-THP-K(NMeAc)-N-3Pya-Sar-CON(Me)2 |
| 292 | cPEG3aCO-Pen(3)-N(N(Me)2)-T-7MeW-K(NMeAc)-Pen(3)- |
| | Diazabiclyclooctane6F-2Nal-THP-K(NMeAc)-N-3Pya-Sar-CON(Me)2 |
| 293 | cPEG3aCO-Pen(3)-N(N(Me)2)-T-7MeW-K(NMeAc)-Pen(3)-TMA6F-2Nal- |
| | THP-K(NMeAc)-N-3Pya-Sar-CON(Me)2 |
| 294 | cPEG3aCO-Pen(3)-N(N(me)2)-T-7(3NAcPh)W-K(NMeAc)-Pen(3)-TMAPF- |
| | 2Nal-THP-K(NMeAc)-N-3Pya-Sar-CON(Me)2 |
| 295 | cPEG3aCO-Pen(3)-N(N(Me)2)-T-7MeW-K(NMeAc)-Pen(3)-TMA8F-2Nal- |
| | THP-K(NMeAc)-N-3Pya-Sar-CON(Me)2 |
| 297 | cPEG3aCO-Pen(3)-N(N(Me)2)-T-7MeW-K(NMeAc)-Pen(3)-NPyPEG3F-2Nal- |
| | THP-K(NMeAc)-N-3Pya-Sar-CON(Me)2 |
| 298 | cPEG3aCO-Pen(3)-N(N(Me)2)-T-7MeW-K(NMeAc)-Pen(3)-dFPPEG3F-2Nal- |
| | THP-K(NMeAc)-N-3Pya-Sar-CON(Me)2 |
| 299 | cPEG3aCO-Pen(3)-n-T-7MeW-K(NMeAc)-Pen(3)-TMAPF-2Nal-THP- |
| | K(NMeAc)-N-3Pya-Sar-CON(Me)2 |
| 300 | cPEG3aCO-Pen(3)-N(N(Me))-T-7MeW-K(NMeAc)-Pen(3)-TMAPF-2Nal-THP- |
| | K(NMeAc)-N-3Pya-Sar-CON(Me)2 |
| 301 | cPEG3aCO-Pen(3)-N(N(Me)2)-T-7MeW-K(NMeAC)-Pen(3)-TMAPF-2Nal- |
| | THP-Dab(NMeAc)-N-3Pya-Sar-CON(Me)2 |
| 302 | cPEG3aCO-Pen(3)-N(N(Me)2)-T-7MeW-K(NMeAc)-Pen(3)-F(4TzlTMA4)- |
| | 2Nal-THP-K(NMeAc)-N-3Pya-Sar-CON(Me)2 |
| 303 | cPEG3aCO-Pen(3)-N(N(Me)2)-T-7MeW-K(NMeAc)-Pen(3)-F(4TzlMME)- |
| | 2Nal-THP-K(NMeAc)-N-3Pya-Sar-CON(Me)2 |
| 304 | cPEG3aCO-Pen(3)-N(N(Me)2)-T-7MeW-K(NMeAc)-Pen(3)-F(4G)-2Nal-THP- |
| | K(NMeAc)-N-3Pya-Sar-CON(Me)2 |
| 305 | cPEG3aCO-Pen(3)-N(N(Me)2)-T-7MeW-K(NMeAc)-Pen(3)-Y(OEOXlMECh)- |
| | 2Nal-THP-K(NMeAc)-N-3Pya-Sar-CON(Me)2 |
| 306 | cPEG3aCO-Pen(3)-N(N(Me)2)-T-7MeW-K(NMeAc)-Pen(3)-Y(OZOXlMECh)- |
| | 2Nal-THP-K(NMeAc)-N-3Pya-Sar-CON(Me)2 |
| 307 | cPEG3aCO-Pen(3)-N(N(Me)2)-T-7MeW-K(NMeAC)-Pen(3)-TMAPF-2Nal- |
| | THP-K(NMeaC)-N-3Pya-NMeK(PEG2PEG2C12)-CONH2 |
| 308 | cPEG3aCO-Pen(3)-N(N(Me)2)-T-7MeW-K(Ac)-Pen(3)-TMAPF-2Nal-THP- |
| | Dab(NMeAc)-N-3Pya-Sar-CON(Me)2 |
| 309 | cPEG3aCO-Pen(3)-n-T-7MeW-K(NMeAC)-Pen(3)-TMAPF-2Nal-THP- |
| | Dab(NMeAc)-N-3Pya-Sar-CON(Me)2 |
| 310 | cPEG3aCO-Pen(3)-N(N(Me)2)-T-7MeW-K(NMeAC)-Pen(3)-TMAPF-2Nal- |
| | THP-Q(N(Me)2)-N-3Pya-Sar-CON(Me)2 |
| 311 | cPEG3aCO-Pen(3)-N-t-7MeW-Dab(NMeAc)-Pen(3)-TMAPF-2Nal-THP- |
| | K(NMeAC)-N-3Pya-Sar-CON(Me)2 |
| 312 | cPEG3aCO-Pen(3)-N(N(Me)2)-T-7MeW-Q(N(Me)2)-Pen(3)-TMAPF-2Nal- |
| | THP-K(NMeAC)-N-3Pya-Sar-CON(Me)2 |
| 313 | cPEG3aCO-Pen(3)-N(N(Me)2)-T-7MeW-K(Ac)-Pen(3)-TMAPF-2Nal-THP- |
| | K(NMeaC)-N-3Pya-NMeK(PEG2PEG2gEC12)-CONH2 |
| 314 | cPEG3aCO-Pen(3)-N(N(Me)2)-T-7MeW-K(NMeAC)-Pen(3)-TMAPF-2Nal- |
| | THP-K(NMeaC)-N-3Pya-NMeK(PEG2PEG2gEC12)-CONH2 |
| 315 | cPEG3aCO-Pen(3)-N(N(Me)2)-T-7MeW-K(NMeAC)-Pen(3)-TMAPF-2Nal- |
| | THP-K(NMeaC)-N-3Pya-NMeK(PEG2PEG2gEC14)-CONH2 |
| 316 | cPEG3aCO-Pen(3)-N(N(Me)2)-T-7MeW-K(NMeAc)-Pen(3)-TMAPF-2Nal- |
| | THP-A-N-3Pya-Sar-CON(Me)2 |
| 317 | cPEG3aCO-Pen(3)-N-T-7MeW-K(Ac)-Pen(3)-TMAPF-2Nal-THP-A-N-3Pya- |
| | Sar-CON(Me)2 |
| 320 | cPEG3aCO-Pen(3)-N(N(Me)2)-T-7MeW-K(NMeAc)-Pen(3)-AEF-2Nal-THP- |
| | K(NMeAc)-N-3Pya-Sar-CON(Me)2 |
| 321 | cPEG3aCO-Pen(3)-N(N(Me)2)-T-7MeW-K(NMeAc)-Pen(3)-AEF(N(Me)2)- |
| | 2Nal-THP-K(NMeAc)-N-3Pya-Sar-CON(Me)2 |
| 326 | cPEG3aCO-Pen(3)-N(N(Me)2)-T-7MeW-K(NMeAc)-Pen(3)-TMAPF-2Nal- |
| | THP-K(NMeAc)-N-3Pya-Sar-CONH2 |
| 327 | cPEG3aCO-Pen(3)-N(N(Me)2)-T-7MeW-K(NMeAc)-Pen(3)-TMAPF-2Nal- |
| | THP-Cit-N-3Pya-Sar-CON(Me)2 |
| 328 | cPEG3aCO-Pen(3)-K(Me)3-T-7MeW-K(NMeAc)-Pen(3)-TMAPF-2Nal-THP- |
| | K(NMeAc)-N-3Pya-Sar-CON(Me)2 |
| 329 | cPEG3aCO-Pen(3)-N(N(Me)2)-T-7MeW-K(Me)3-Pen(3)-TMAPF-2Nal-THP- |
| | K(NMeAc)-N-3Pya-Sar-CON(Me)2 |
| 330 | cPEG3aCO-Pen(3)-N(N(Me)2)-T-7MeW-K(NMeAc)-Pen(3)-TMAPF-2nal- |
| | Acpx-K(NMeAc)-N-3Pya-Sar-CON(Me)2 |
| 331 | cPEG3aCO-Pen(3)-N(N(Me)2)-T-7MeW-K(NMeAc)-Pen(3)-F(4N3)-2Nal- |
| | THP-K(NMeAc)-N-3Pya-Sar-CON(Me)2 |
| 332 | cPEG3aCO-Pen(3)-N(N(Me)2)-T-7MeW-K(NMeAc)-Pen(3)-F(4TzlTMA1)- |
| | 2Nal-THP-K(NMeAc)-N-3Pya-Sar-CON(Me)2 |
| 333 | cPEG3aCO-Pen(3)-N(N(Me)2)-T-7MeW-K(NMeAc)-Pen(3)-F(4TzlTMA2)- |
| | 2Nal-THP-K(NMeAc)-N-3Pya-Sar-CON(Me)2 |
| 334 | cPEG3aCO-Pen(3)-N(N(Me)2)-T-7MeW-K(NMeAc)-Pen(3)-F(4TzlTMA3)- |
| | 2Nal-THP-K(NMeAc)-N-3Pya-Sar-CON(Me)2 |
| 335 | cPEG3aCO-Pen(3)-N(N(Me)2)-T-7MeW-K(NMeAc)-Pen(3)-F(4TzlTMA5)- |
| | 2Nal-THP-K(NMeAc)-N-3Pya-Sar-CON(Me)2 |
| 336 | cPEG3aCO-Pen(3)-N(N(Me)2)-T-7MeW-K(NMeAc)-Pen(3)-F(4TzlMMo4)- |
| | 2Nal-THP-K(NMeAc)-N-3Pya-Sar-CON(Me)2 |
| 337 | cPEG3aCO-Pen(3)-N(N(Me)2)-T-7MeW-K(NMeAc)-Pen(3)- |
| | F(4TzlDMA4mPEG)-2Nal-THP-K(NMeAc)-N-3Pya-Sar-CON(Me)2 |
| 338 | cPEG3aCO-Pen(3)-N(N(Me)2)-T-7MeW-K(NMeAc)-Pen(3)-hFTMAPF-2Nal- |
| | THP-K(NMeAc)-N-3Pya-Sar-CON(Me)2 |
| 339 | cPEG3aCO-Pen(3)-N(N(Me)2)-T-7MeW-K(NMeAc)-Pen(3)-TMAPF-2nal- |
| | Achx-K(NMeAc)-N-3Pya-Sar-CON(Me)2 |
| 340 | cPEG3aCO-Pen(3)-N(N(Me)2)-T-7MeW-K(NMeAc)-Pen(3)-TMAPF-2Nal- |
| | Chg-K(NMeAc)-N-3Pya-Sar-CON(Me)2 |
| 341 | cPEG3aCO-Pen(3)-N(N(Me)2)-T-7MeW-K(NMeAc)-Pen(3)-TMAPF-2Nal- |
| | Aib-K(NMeAc)-N-3Pya-Sar-CON(Me)2 |
| 342 | cPEG3aCO-Pen(3)-K(Me)3-T-7MeW-K(NMeAc)-Pen(3)-TMAPF-2nal-Achx- |
| | K(NMeAc)-N-3Pya-Sar-CON(Me)2 |
| 346 | cPEG3aCO-Pen(3)-N(N(Me)2)-T-7MeW-Cit-Pen(3)-TMAPF-2Nal-THP- |
| | K(NMeAc)-N-3Pya-Sar-CON(Me)2 |
| 347 | cPEG3aCO-k(PEG2PEG2gEC14)-Pen(3)-N(N(Me)2)-T-7MeW-K(Ac)-Pen(3)- |
| | TMAPF-2Nal-THP-K(NMeac)-N-3Pya-NMeK(PEG2PEG2gEC14)-CONH2 |
| 348 | cPEG3aCO-k(PEG2PEG2gEC12)-Pen(3)-N(N(Me)2)-T-7MeW-K(Ac)-Pen(3)- |
| | TMAPF-2Nal-THP-K(NMeac)-N-3Pya-NMeK(PEG2PEG2gEC12)-CONH2 |
| 349 | cPEG3aCO-Pen(3)-N-T-7MeW-K(Ac)-Pen(3)-TMAPF-2Nal-THP- |
| | K(PEG2PEG2gEC12)-N-3Pya-NMeK(PEG2PEG2gEC12)-CONH2 |
| 351 | cPEG3aCO-Pen(3)-N(N(Me)2)-T-7MeW-K(Ac)-Pen(3)-TMAPF-2Nal-THP- |
| | K(PEG2PEG2gEC14)-N-3Pya-NMeK(PEG2PEG2gEC14)-CONH2 |
| 352 | cPEG3aCO-Pen(3)-N(N(Me)2)-T-7MeW-K(PEG2PEG2gEC12)-Pen(3)- |
| | TMAPF-2Nal-THP-K(NMeac)-N-3Pya-NMeK(PEG2PEG2gEC12)-CONH2 |
| 353 | cPEG3aCO-Pen(3)-N(N(Me)2)-T-7MeW-K(Ac)-Pen(3)-TMAPF-2Nal-THP- |
| | K(PEG2PEG2gEC12)-N-3Pya-NMeK(PEG2PEG2gEC12)-CONH2 |
| 355 | cPEG3aCO-Pen(3)-N(N(Me)2)-T-7MeW-K(PEG2PEG2gEC14)-Pen(3)- |
| | TMAPF-2Nal-THP-K(NMeac)-N-3Pya-NMeK(PEG2PEG2gEC14)-CONH2 |
| 356 | cPEG3aCO-Pen(3)-K(PEG2PEG2gEC12)-T-7MeW-K(Ac)-Pen(3)-TMAPF- |
| | 2Nal-THP-K(NMeac)-N-3Pya-NMeK(PEG2PEG2gEC12)-CONH2 |
| 357 | cPEG3aCO-Pen(3)-K(PEG2PEG2gEC14)-T-7MeW-K(Ac)-Pen(3)-TMAPF- |
| | 2Nal-THP-K(NMeac)-N-3Pya-NMeK(PEG2PEG2gEC14)-CONH2 |
| 358 | cPEG3aCO-Pen(3)-N(N(Me)2)-t-7MeW-Dab(NMeAc)-Pen(3)-TMAPF-2Nal- |
| | THP-K(NMeAc)-N-3Pya-Sar-CON(Me)2 |
| 359 | cPEG3aCO-Pen(3)-N(N(Me)2)-T-7MeW-K(Ac)-Pen(3)-TMAPF-2Nal-THP- |
| | K(NMeac)-N-3Pya-NMeK(PEG2PEG2C14)-CONH2 |
| 360 | cPEG3aCO-Pen(3)-N(N(Me)2)-T-7MeW-K(Ac)-Pen(3)-TMAPF-2Nal-THP- |
| | K(NMeac)-N-3Pya-NMeK(PEG2PEG6gEC12)-CONH2 |
| 361 | cPEG3aCO-Pen(3)-N(N(Me)2)-T-7MeW-K(Ac)-Pen(3)-TMAPF-2Nal-THP- |
| | K(NMeac)-N-3Pya-NMeK(PEG2PEG6gEC14)-CONH2 |
| 362 | cPEG3aCO-Pen(3)-N(N(Me)2)-t-7MeW-Dab(NMeAc)-Pen(3)-TMAPF-2Nal- |
| | THP-K(NMeAc)-N-3Pya-Sar-CONH2 |
| 363 | cPEG3aCO-Pen(3)-N(N(Me)2)-T-7MeW-K(NMeAc)-Pen(3)-APEG3F-2Nal- |
| | THP-K(NMeAc)-N-3Pya-Sar-CONH2 |
| 364 | cPEG3aCO-Pen(3)-APEG2Ser(S*)-T-7MeW-K(NMeAc)-Pen(3)-APEG3F- |
| | 2Nal-THP-K(NMeAc)-N-3Pya-Sar-CON(Me)2 |
| 370 | cPEG3aCO-k(PEG2PEG6gEC12)-Pen(3)-N(N(Me)2)-T-7MeW-K(Ac)-Pen(3)- |
| | TMAPF-2Nal-THP-K(NMeac)-N-3Pya-NMeK(PEG2PEG6gEC12)-CONH2 |
| 371 | cPEG3aCO-Pen(3)-N-T-7MeW-K(Ac)-Pen(3)-TMAPF-2Nal-THP-K(NMeac)- |
| | N-3Pya-NMeK(PEG2PEG2gEC12)-CONH2 |
| 372 | cPEG3aCO-Pen(3)-N(N(Me)2)-T-7MeW-K(Ac)-Pen(3)-TMAPF-2Nal-THP- |
| | K(NMeac)-N-3Pya-NMeK(PEG2PEG2K(PEG2PEG2gEC12)2)-CONH2 |
| 373 | cPEG3aCO-Pen(3)-N(N(Me)2)-T-7MeW-K(Ac)-Pen(3)-TMAPF-2Nal-THP- |
| | K(PEG2PEG2PEG2gEC12))-N-3Pya-NMeK(PEG2PEG2PEG2gEC12)-CONH2 |
| 378 | cPEG3aCO-k(PEG2PEG2gEC12)-Pen(3)-N(N(Me)2)-T-7MeW-K(NMeAc)- |
| | Pen(3)-TMAPF-2Nal-THP-K(NMeAc)-N-3Pya-Sar-CON(Me)2 |
| 379 | cPEG3aCO-k(PEG2PEG2gEC14)-Pen(3)-N(N(Me)2)-T-7MeW-K(NMeAc)- |
| | Pen(3)-TMAPF-2Nal-THP-K(NMeAc)-N-3Pya-Sar-CON(Me)2 |
| 380 | cPEG3aCO-k(PEG2PEG2gEC12)-Pen(3)-K(PEG2PEG2gEC12)-T-7MeW- |
| | K(NMeAc)-Pen(3)-TMAPF-2Nal-THP-K(NMeAc)-N-3Pya-Sar-CON(Me)2 |
| 381 | cPEG3aCO-k(PEG2PEG2gEC14)-Pen(3)-K(PEG2PEG2gEC14)-T-7MeW- |
| | K(NMeAc)-Pen(3)-TMAPF-2Nal-THP-K(NMeAc)-N-3Pya-Sar-CON(Me)2 |
| 382 | cPEG3aCO-k(PEG2PEG2gEC12)-Pen(3)-N(N(Me)2)-T-7MeW- |
| | K(PEG2PEG2gEC12)-Pen(3)-TMAPF-2Nal-THP-K(NMeAc)-N-3Pya-Sar- |
| | CON(Me)2 |
| 384 | cPEG3aCO-Pen(3)-N(N(Me)2)-T-7MeW-K(cPEG3a)-Pen(3)-TMAPF-2Nal- |
| | THP-K(NMeAc)-N-3Pya-Sar-CON(Me)2 |
| 387 | cPEG3aCO-Pen(3)-K(PEG2PEG2gEC12)-T-7MeW-K(NMeAc)-Pen(3)-TMAPF- |
| | 2Nal-THP-K(NMeAc)-N-3Pya-Sar-CON(Me)2 |
| 388 | cPEG3aCO-Pen(3)-K(PEG2PEG2gEC14)-T-7MeW-K(NMeAc)-Pen(3)-TMAPF- |
| | 2Nal-THP-K(NMeAc)-N-3Pya-Sar-CON(Me)2 |
| 389 | cPEG3aCO-Pen(3)-K(PEG2PEG2gEC12)-T-7MeW-K(PEG2PEG2gEC12)- |
| | Pen(3)-TMAPF-2Nal-THP-K(NMeAc)-N-3Pya-Sar-CON(Me)2 |
| 392 | cPEG3aCO-Pen(3)-N(N(Me)2)-T-7MeW-K(4cpg)-Pen(3)-TMAPF-2Nal-THP- |
| | K(NMeAc)-N-3Pya-Sar-CON(Me)2 |
| 393 | cPEG3aCO-Pen(3)-K(cPEG3a)-T-7MeW-K(NMeAc)-Pen(3)-TMAPF-2Nal- |
| | THP-K(NMeAc)-N-3Pya-Sar-CON(Me)2 |
| 394 | cPEG3aCO-k(PEG2PEG2gEC12)-Pen(3)-N(N(Me)2)-T-7MeW-K(NMeAc)- |
| | Pen(3)-TMAPF-2Nal-THP-K(PEG2PEG2gEC12)-N-3Pya-Sar-CON(Me)2 |
| 395 | cPEG3aCO-k(PEG2PEG2gEC14)-Pen(3)-N(N(Me)2)-T-7MeW-K(NMeAc)- |
| | Pen(3)-TMAPF-2Nal-THP-K(PEG2PEG2gEC14)-N-3Pya-Sar-CON(Me)2 |
| 396 | cPEG3aCO-Pen(3)-K(PEG2PEG2gEC14)-T-7MeW-K(PEG2PEG2gEC14)- |
| | Pen(3)-TMAPF-2Nal-THP-K(NMeAc)-N-3Pya-Sar-CON(Me)2 |
| 397 | cPEG3aCO-Pen(3)-K(PEG2PEG2gEC12)-T-7MeW-K(NMeAc)-Pen(3)-TMAPF- |
| | 2Nal-THP-K(PEG2PEG2gEC12)-N-3Pya-Sar-CON(Me)2 |
| 398 | cPEG3aCO-Pen(3)-K(PEG2PEG2gEC14)-T-7MeW-K(NMeAc)-Pen(3)-TMAPF- |
| | 2Nal-THP-K(PEG2PEG2gEC14)-N-3Pya-Sar-CON(Me)2 |
| 399 | cPEG3aCO-Pen(3)-N(N(Me)2)-T-7MeW-K(PEG2PEG2gEC14)-Pen(3)- |
| | TMAPF-2Nal-THP-K(NMeAc)-N-3Pya-Sar-CON(Me)2 |
| 400 | cPEG3aCO-Pen(3)-N(N(Me)2)-T-7MeW-K(PEG2PEG2gEC12)-Pen(3)- |
| | TMAPF-2Nal-THP-K(PEG2PEG2gEC12)-N-3Pya-Sar-CON(Me)2 |
| 401 | cPEG3aCO-Pen(3)-N(N(Me)2)-T-7MeW-K(NMeAc)-Pen(3)-TMAPF-2Nal- |
| | THP-K(PEG2PEG2gEC12)-N-3Pya-Sar-CON(Me)2 |
| 402 | cPEG3aCO-Pen(3)-N(N(Me)2)-T-7MeW-K(NMeAc)-Pen(3)-TMAPF-2Nal- |
| | THP-K(PEG2PEG2gEC14)-N-3Pya-Sar-CON(Me)2 |
| 404 | cPEG3aCO-k(PEG2PEG2PEG2PEG2gEC12)-Pen(3)-N(N(Me)2)-T-7MeW- |
| | K(Ac)-Pen(3)-TMAPF-2Nal-THP-K(NMeac)-N-3Pya- |
| | NMeK(PEG2PEG2PEG2PEG2gEC12)-CONH2 |
| 405 | cPEG3aCO-Pen(3)-N(N(Me)2)-T-7MeW-K(NMeAc)-Pen(3)-GPEG3F-2Nal- |
| | THP-K(NMeAc)-N-3Pya-Sar-CON(Me)2 |
| 407 | cPEG3aCO-Pen(3)-N(N(Me)2)-T-7MeW-K(Ac)-Pen(3)-TMAPF-2Nal-THP- |
| | K(NMeac)-N-3Pya-NMeK(SP6PEG2PEG2C12)-CONH2 |
| 408 | cPEG3aCO-Pen(3)-N(N(Me)2)-T-7MeW-K(Ac)-Pen(3)-TMAPF-2Nal-THP- |
| | K(NMeac)-N-3Pya-NMeK(SP6PEG2PEG2gEC12)-CONH2 |
| 409 | cPEG3aCO-Pen(3)-N(N(Me)2)-T-7MeW-K(Ac)-Pen(3)-TMAPF-2Nal-THP- |
| | K(NMeac)-N-3Pya-NMeK(PEG2PEG2K(PEG2PEG2PEG2PEG2gEC12)2)- |
| | CONH2 |
| 410 | cPEG3aCO-Pen(3)-N(N(Me)2)-T-7MeW-K(PEG2PEG2gEC14)-Pen(3)- |
| | TMAPF-2Nal-THP-K(PEG2PEG2gEC14)-N-3Pya-Sar-CON(Me)2 |
| 411 | cPEG3aCO-Pen(3)-Gab-T-7MeW-K(NMeAc)-Pen(3)-APEG3F-2Nal-THP- |
| | K(NMeAc)-N-3Pya-Sar-CON(Me)2 |
| 414 | cPEG3aCO-Pen(3)-N(N(Me)2)-t-7MeW-Dap(NMeAc)-Pen(3)-TMAPF-2Nal- |
| | THP-K(NMeAc)-N-3Pya-Sar-CON(Me)2 |
| 415 | cPEG3aCO-Pen(3)-N(N(Me)2)-T-7MeW-K(Ac)-Pen(3)-TMAPF-2Nal-THP- |
| | Dap(NMeAc)-N-3Pya-Sar-CON(Me)2 |
| 416 | cPEG3aCO-Pen(3)-Dab(Me)3-T-7MeW-K(NMeAc)-Pen(3)-APEG3F-2Nal- |
| | THP-K(NMeAc)-N-3Pya-Sar-CON(Me)2 |
| 418 | cPEG3aCO-Pen(3)-N-T-7MeW-K(Ac)-Pen(3)-F(4N3)-2Nal-THP-K(Ac)-N- |
| | 3Pya-Sar-CONH2 |
| 419 | cPEG3aCO-Pen(3)-N(N(Me)2)-T-7MeW-K(NMeAc)-Pen(3)-APEG3F-2Nal- |
| | THP-Dap(NMeAc)-N-3Pya-Sar-CON(Me)2 |
| 420 | cPEG3aCO-Pen(3)-N-T-7MeW-K(Ac)-Pen(3)-F(4TzlTMA3)-2Nal-THP-K(Ac)- |
| | N-3Pya-Sar-CONH2 |
| 421 | cPEG3aCO-Pen(3)-N(N(me)2)-T-7(3NAcPh)W-K(NMeac)-Pen(3)-MMoEF- |
| | 2Nal-THP-K(NMeAc)-N-3Pya-Sar-CON(Me)2 |
| 424 | cPEG3aCO-Pen(3)-N-T-7MeW-K(Ac)-Pen(3)-F(4TzlTMA4)-2Nal-THP-K(Ac)- |
| | N-3Pya-Sar-CONH2 |
| 427 | cPEG3aCO-Pen(3)-N-T-7MeW-K(Ac)-Pen(3)-TMAPF-2Nal-THP-E-N-3Pya- |
| | Sar-CONH2 |
| 428 | cPEG3aCO-Pen(3)-N-T-7MeW-K(Ac)-Pen(3)-TMAPF-2Nal-THP-K(Ac)-N- |
| | 3Pya-Sar-CONH2 |
| 438 | cPEG3aCO-Pen(3)-N-T-7MeW-K(Ac)-Pen(3)-F(4TzlTMA1)-2Nal-THP-K(Ac)- |
| | N-3Pya-Sar-CONH2 |
| 439 | cPEG3aCO-Pen(3)-N-T-7MeW-K(Ac)-Pen(3)-F(4TzlMMo3)-2Nal-THP-K(Ac)- |
| | N-3Pya-Sar-CONH2 |
| 443 | cPEG3aCO-Pen(3)-N-T-7(3NAcPh)W-K(Ac)-Pen(3)-AEF-2Nal-THP-E-N-3Pya- |
| | Sar-CONH2 |
| 444 | cPEG3aCO-Pen(3)-N-T-7(3NAcPh)W-K(Ac)-Pen(3)-TMAPF-2Nal-THP-E-N- |
| | 3Pya-Sar-CONH2 |
| 445 | cPEG3aCO-Pen(3)-N-T-7(3NAcPh)W-K(Ac)-Pen(3)-AEF-2Nal-THP-K(Ac)-N- |
| | 3Pya-Sar-CONH2 |
| 463 | cPEG3aCO-Pen(3)-L-T-7MeW-L-Pen(3)-APEG3f-2Nal-L-K(NMeAc)-N-3Pya- |
| | Sar-CON(Me)2 |
| 464 | cPEG3aCO-Pen(3)-F-T-7MeW-F-Pen(3)-APEG3f-2Nal-F-K(NMeAc)-N-3Pya- |
| | Sar-CON(Me)2 |
| 465 | cPEG3aCO-Pen(3)-W-T-7MeW-W-Pen(3)-APEG3f-2Nal-W-K(NMeAc)-N- |
| | 3Pya-Sar-CON(Me)2 |
| 466 | cPEG3aCO-Pen(3)-N(N(Me)2)-T-7MeW-K(NMeAc)-Pen(3)-APEG3F-2Nal- |
| | THP-A-N-3Pya-Sar-CON(Me)2 |
| 467 | cPEG3aCO-Pen(3)-N(N(Me)2)-T-7MeW-K(NMeAc)-Pen(3)-APEG3F-2Nal- |
| | THP-L-N-3Pya-Sar-CON(Me)2 |
| 468 | cPEG3aCO-Pen(3)-A-T-7MeW-A-Pen(3)-APEG3f-2Nal-A-K(NMeAc)-N-3Pya- |
| | Sar-CON(Me)2 |
| 469 | cPEG3aCO-Pen(3)-N(N(Me)2)-T-7MeW-K(NMeAc)-Pen(3)-APEG3F-2Nal- |
| | THP-F-N-3Pya-Sar-CON(Me)2 |
| 470 | cPEG3aCO-Pen(3)-N(N(Me)2)-T-7MeW-K(NMeAc)-Pen(3)-APEG3F-2Nal- |
| | THP-W-N-3Pya-Sar-CON(Me)2 |
| 471 | cPEG3aCO-Pen(3)-N-T-7MeW-K(Ac)-Pen(3)-AEF(G)-2Nal-THP-K(Ac)-N- |
| | 3Pya-Sar-CONH2 |
| 472 | cPEG3aCO-Pen(3)-N(N(Me)2)-T-7MeW-K(NMeAc)-Pen(3)-Y(OTzlTMA4)- |
| | 2Nal-THP-K(NMeAc)-N-3Pya-Sar-CON(Me)2 |
| 473 | cPEG3aCO-r-Pen(3)-N-T-7MeW-K(Ac)-Pen(3)-AEF-2Nal-THP-E-N- |
| | 5MePyridinAla-Sar-CONH2 |

TABLE 1D
Compounds

| SEQ ID | Harmonized Sequences txt |
|---|---|
| 3 | MeCO-r-Pen(3)-Q-T-W-Q-Pen(3)-AEF-2Nal-THp-aMeE-N-F-NMeDTyr- |
| | CONH2 |
| 4 | MeCO-r-Pen(3)-Q-T-W-Q-Pen(3)-AEF-2Nal-THP-E-N-N-NMe DTyr-CONH2 |
| 5 | MeCO-Pen(3)-N-T-7MeW-K(Ac)-Pen(3)-AEF-2Nal-aMeK-k(Ac)-N-dK- |
| | NMeDTyr-CONH2 |
| 6 | MeCO-Pen(3)-N-T-7MeW-K(Ac)-Pen(3)-AEF-2Nal-aMeK-k(Ac)-N-dL- |
| | NMeDTyr-CONH2 |
| 7 | MeCO-Pen(3)-N-T-7MeW-K(Ac)-Pen(3)-AEF-2Nal-aMeK-K(Ac)-N-F- |
| | NMeDTyr-CONH2 |
| 8 | MeCO-Pen(3)-N-T-7MeW-K(Ac)-Pen(3)-AEF-2Nal-aMeK-K(Ac)-N-H- |
| | NMeDTyr-CONH2 |
| 9 | MeCO-r-Pen(3)-N-T-7MeW-K(Ac)-Pen(3)-AEF-2Nal-aMeK-E-N-H-NMeDTyr- |
| | CONH2 |
| 10 | MeCO-Pen(3)-N-T-7MeW-K(Ac)-Pen(3)-AEF-2Nal-aMeK-K(Ac)-N-Paf- |
| | NMeDTyr-CONH2 |
| 11 | MeCO-r-Pen(3)-N-T-7MeW-K(Ac)-Pen(3)-AEF-2Nal-THP-E-N-h-NMeDTyr- |
| | CONH2 |
| 12 | MeCO-r-Pen(3)-N-T-7MeW-K(Ac)-Pen(3)-AEF-2Nal-THP-E-N-N-NMeDTyr- |
| | CONH2 |
| 13 | MeCO-Pen(3)-N-T-7MeW-K(Ac)-Pen(3)-AEF-2Nal-aMeK-K(Ac)-N-N- |
| | NMeDTyr-CONH2 |
| 14 | MeCO-Pen(3)-N-T-7MeW-K(Ac)-Pen(3)-AEF-2Nal-aMeK-K(Ac)-N-v- |
| | NMeDTyr-CONH2 |
| 15 | MeCO-Pen(3)-N-T-7MeW-K(Ac)-Pen(3)-AEF-2Nal-aMeK-K(Ac)-N-t- |
| | NMeDTyr-CONH2 |
| 16 | MeCO-r-Pen(3)-N-T-7MeW-Cit-Pen(3)-AEF-2Nal-aMeL-E-N-k-NMeDTyr- |
| | CONH2 |
| 17 | MeCO-r-Pen(3)-N-T-7MeW-Cit-Pen(3)-AEF-2Nal-aMeL-E-N-h-NMeDTyr- |
| | CONH2 |
| 18 | MeCO-Pen(3)-N-T-7MeW-K(Ac)-Pen(3)-AEF-2Nal-aMeK-K(Ac)-N-orn- |
| | NMeDTyr-CONH2 |
| 19 | MeCO-Pen(3)-N-T-7MeW-K(Ac)-Pen(3)-AEF-2Nal-aMeK-K(Ac)-N-s- |
| | NMeDTyr-CONH2 |
| 20 | MeCO-Pen(3)-N-T-7MeW-K(Ac)-Pen(3)-AEF-2Nal-aMeK-K(Ac)-N-f- |
| | NMeDTyr-CONH2 |
| 21 | MeCO-Pen(3)-N-T-7MeW-Y-Pen(3)-AEF-2Nal-aMeK-K(Ac)-N-k-NMeDTyr- |
| | CONH2 |
| 22 | MeCO-Pen(3)-N-T-7MeW-4AmPhe-Pen(3)-AEF-2Nal-aMeK-K(Ac)-N-k- |
| | NMeDTyr-CONH2 |
| 23 | MeCO-Pen(3)-N-T-7MeW-Paf(Ac)-Pen(3)-AEF-2Nal-aMeK-K(Ac)-N-k- |
| | NMeDTyr-CONH2 |
| 24 | MeCO-Pen(3)-N-T-7MeW-K(Ac)-Pen(3)-AEF-2Nal-aMeK-K(Ac)-N-y- |
| | NMeDTyr-CONH2 |
| 25 | MeCO-Pen(3)-N-T-7MeW-Cit-Pen(3)-AEF-2Nal-aMeL-K(Ac)-N-k-NMeDTyr- |
| | CONH2 |
| 26 | MeCO-Pen(3)-N-T-7MeW-K(Ac)-Pen(3)-AEF-2Nal-aMeK-K(Ac)-N-h- |
| | NMeDTyr-CONH2 |
| 27 | MeCO-Pen(3)-N-T-7MeW-K(Ac)-Pen(3)-AEF-2Nal-aMeK-K(ac)-N-bAla- |
| | NMeDTyr-CONH2 |
| 28 | MeCO-Pen(3)-N-T-7MeW-K(Ac)-Pen(3)-AEF-2Nal-aMeK-K(ac)-N-bAla- |
| | NMeDTyr-CONH2 |
| 29 | MeCO-Pen(3)-N-T-7MeW-K(Ac)-Pen(3)-AEF-2Nal-aMeK-K(ac)-N-bAla- |
| | NMeDTyr-CONH2 |
| 30 | MeCO-Pen(3)-N-T-7MeW-K(Ac)-Pen(3)-AEF-2Nal-aMeK-K(ac)-N-3Pya- |
| | NMeDTyr-CONH2 |
| 32 | MeCO-Pen(3)-N-T-7MeW-K(Ac)-Pen(3)-AEF-2Nal-aMeK-K(ac)-N-3pya- |
| | NMeDTyr-CONH2 |
| 35 | MeCO-r-Pen(3)-N-T-7MeW-K(Ac)-Pen(3)-AEF-2Nal-THp-E-N-3Pya- |
| | NMeDTyr-CONH2 |

TABLE 1E
Compounds

| SEQ ID | Harmonized Sequences txt |
|---|---|
| 101 | 5cpaCO-Pen(3)-N(N(Me)2)-T-7MeW-Q(N(Me)2)-Pen(3)-TMAPF-2Nal-THP- |
| | Q(N(Me)2)-N-3Pya-Sar-CON(Me)2 |
| 164 | cPEG3aCO-Pen(3)-N(N(Me)2)-T-7MeW-K(NMeAc)-Pen(3)-TMAPF-2Nal- |
| | THP-K(NMeAc)-N-3Pya-Sar-CON(Me)2 |
| 165 | cPEG3aCO-Pen(3)-N(N(Me)2)-T-7MeW-K(NMeAc)-Pen(3)-TMAPF-2Nal- |
| | THP-E-N-3Pya-Sar-CON(Me)2 |
| 186 | MeCO-Pen(3)-n-T-7MeW-K(NMeAc)-Pen(3)-TMAPF-2Nal-THP-K(NMeAc)- |
| | N-3Pya-Sar-CONH2 |
| 188 | cPEG3aCO-Pen(3)-n-T-7MeW-K(NMeAc)-Pen(3)-TMAPF-2Nal-THP- |
| | K(NMeAc)-N-3Pya-Sar-CONH2 |
| 190 | MeCO-Pen(3)-N(N(Me)2)-T-7MeW-K(NMeAc)-Pen(3)-TMAPF-2Nal-THP- |
| | K(NMeAc)-N-3Pya-Sar-CON(Me)2 |
| 219 | MeCO-Pen(3)-N(N(Me)2)-T-7MeW-K(NMeAc)-Pen(3)-TMAPF-2Nal-THP- |
| | K(NMeAc)-N-3Pya-Sar-CO(NHPEG3a) |
| 220 | cPEG3aCO-Pen(3)-N(N(Me)2)-T-7MeW-K(NMeAc)-Pen(3)-TMAPF-2Nal- |
| | THP-K(NMeAc)-N-3Pya-Sar-CO(NHPEG3a) |
| 247 | cPEG3aCO-Pen(3)-N(N(Me)2)-T-7MeW-APEG2Ser(S*)-Pen(3)-TMAPF- |
| | 2Nal-THP-K(NMeAc)-N-3Pya-Sar-CON(Me)2 |
| 248 | cPEG3aCO-Pen(3)-N(N(Me)2)-T-7MeW-APEG2Ser(R*)-Pen(3)-TMAPF- |
| | 2Nal-THP-K(NMeAc)-N-3Pya-Sar-CON(Me)2 |
| 275 | MeCO-Pen(3)-N(N(Me)2)-T-7MeW-K(NMeAc)-Pen(3)-TMAPF-2Nal-THP- |
| | APEG2Ser-N-3Pya-Sar-CON(Me)2 |
| 281 | MeCO-Pen(3)-N-T-7MeW-K(Ac)-Pen(3)-TMAPF-2Nal-THP-K(Ac)-N-3Pya- |
| | Sar-CONH2 |
| 294 | cPEG3aCO-Pen(3)-N(N(me)2)-T-7(3NAcPh)W-K(NMeAc)-Pen(3)-TMAPF- |
| | 2Nal-THP-K(NMeAc)-N-3Pya-Sar-CON(Me)2 |
| 299 | cPEG3aCO-Pen(3)-n-T-7MeW-K(NMeAc)-Pen(3)-TMAPF-2Nal-THP- |
| | K(NMeAc)-N-3Pya-Sar-CON(Me)2 |
| 300 | cPEG3aCO-Pen(3)-N(N(Me))-T-7MeW-K(NMeAc)-Pen(3)-TMAPF-2Nal-THP- |
| | K(NMeAc)-N-3Pya-Sar-CON(Me)2 |
| 301 | cPEG3aCO-Pen(3)-N(N(Me)2)-T-7MeW-K(NMeAC)-Pen(3)-TMAPF-2Nal- |
| | THP-Dab(NMeAc)-N-3Pya-Sar-CON(Me)2 |
| 307 | cPEG3aCO-Pen(3)-N(N(Me)2)-T-7MeW-K(NMeAC)-Pen(3)-TMAPF-2Nal- |
| | THP-K(NMeaC)-N-3Pya-NMeK(PEG2PEG2C12)-CONH2 |
| 308 | cPEG3aCO-Pen(3)-N(N(Me)2)-T-7MeW-K(Ac)-Pen(3)-TMAPF-2Nal-THP- |
| | Dab(NMeAc)-N-3Pya-Sar-CON(Me)2 |
| 309 | cPEG3aCO-Pen(3)-n-T-7MeW-K(NMeAC)-Pen(3)-TMAPF-2Nal-THP- |
| | Dab(NMeAc)-N-3Pya-Sar-CON(Me)2 |
| 310 | cPEG3aCO-Pen(3)-N(N(Me)2)-T-7MeW-K(NMeAC)-Pen(3)-TMAPF-2Nal- |
| | THP-Q(N(Me)2)-N-3Pya-Sar-CON(Me)2 |
| 311 | cPEG3aCO-Pen(3)-N-t-7MeW-Dab(NMeAc)-Pen(3)-TMAPF-2Nal-THP- |
| | K(NMeAC)-N-3Pya-Sar-CON(Me)2 |
| 312 | cPEG3aCO-Pen(3)-N(N(Me)2)-T-7MeW-Q(N(Me)2)-Pen(3)-TMAPF-2Nal- |
| | THP-K(NMeAC)-N-3Pya-Sar-CON(Me)2 |
| 313 | cPEG3aCO-Pen(3)-N(N(Me)2)-T-7MeW-K(Ac)-Pen(3)-TMAPF-2Nal-THP- |
| | K(NMeaC)-N-3Pya-NMeK(PEG2PEG2gEC12)-CONH2 |
| 314 | cPEG3aCO-Pen(3)-N(N(Me)2)-T-7MeW-K(NMeAC)-Pen(3)-TMAPF-2Nal- |
| | THP-K(NMeaC)-N-3Pya-NMeK(PEG2PEG2gEC12)-CONH2 |
| 315 | cPEG3aCO-Pen(3)-N(N(Me)2)-T-7MeW-K(NMeAC)-Pen(3)-TMAPF-2Nal- |
| | THP-K(NMeaC)-N-3Pya-NMeK(PEG2PEG2gEC14)-CONH2 |
| 316 | cPEG3aCO-Pen(3)-N(N(Me)2)-T-7MeW-K(NMeAc)-Pen(3)-TMAPF-2Nal- |
| | THP-A-N-3Pya-Sar-CON(Me)2 |
| 317 | cPEG3aCO-Pen(3)-N-T-7MeW-K(Ac)-Pen(3)-TMAPF-2Nal-THP-A-N-3Pya- |
| | Sar-CON(Me)2 |
| 322 | C12gEPEG2PEG2CO-hk(Me)3-Pen(3)-N(N(Me)2)-T-7MeW-K(NMeAc)- |
| | Pen(3)-TMAPF-2Nal-THP-K(NMeAc)-N-3Pya-Sar-CON(Me)2 |
| 323 | C12gEPEG2PEG2CO-hk(Me)3-Pen(3)-N(N(Me)2)-T-7MeW- |
| | K(PEG2PEG2gEC12)-Pen(3)-TMAPF-2Nal-THP-K(NMeAc)-N-3Pya-Sar- |
| | CON(Me)2 |
| 324 | C14gEPEG2PEG2CO-hk(Me)3-Pen(3)-N(N(Me)2)-T-7MeW-K(NMeAc)- |
| | Pen(3)-TMAPF-2Nal-THP-K(NMeAc)-N-3Pya-Sar-CON(Me)2 |
| 325 | C14gEPEG2PEG2CO-hk(Me)3-Pen(3)-N(N(Me)2)-T-7MeW- |
| | K(PEG2PEG2gEC14)-Pen(3)-TMAPF-2Nal-THP-K(NMeAc)-N-3Pya-Sar- |
| | CON(Me)2 |
| 326 | cPEG3aCO-Pen(3)-N(N(Me)2)-T-7MeW-K(NMeAc)-Pen(3)-TMAPF-2Nal- |
| | THP-K(NMeAc)-N-3Pya-Sar-CONH2 |
| 327 | cPEG3aCO-Pen(3)-N(N(Me)2)-T-7MeW-K(NMeAc)-Pen(3)-TMAPF-2Nal- |
| | THP-Cit-N-3Pya-Sar-CON(Me)2 |
| 328 | cPEG3aCO-Pen(3)-K(Me)3-T-7MeW-K(NMeAc)-Pen(3)-TMAPF-2Nal-THP- |
| | K(NMeAc)-N-3Pya-Sar-CON(Me)2 |
| 329 | cPEG3aCO-Pen(3)-N(N(Me)2)-T-7MeW-K(Me)3-Pen(3)-TMAPF-2Nal-THP- |
| | K(NMeAc)-N-3Pya-Sar-CON(Me)2 |
| 330 | cPEG3aCO-Pen(3)-N(N(Me)2)-T-7MeW-K(NMeAc)-Pen(3)-TMAPF-2nal- |
| | Acpx-K(NMeAc)-N-3Pya-Sar-CON(Me)2 |
| 339 | cPEG3aCO-Pen(3)-N(N(Me)2)-T-7MeW-K(NMeAc)-Pen(3)-TMAPF-2nal- |
| | Achx-K(NMeAc)-N-3Pya-Sar-CON(Me)2 |
| 340 | cPEG3aCO-Pen(3)-N(N(Me)2)-T-7MeW-K(NMeAc)-Pen(3)-TMAPF-2Nal- |
| | Chg-K(NMeAc)-N-3Pya-Sar-CON(Me)2 |
| 341 | cPEG3aCO-Pen(3)-N(N(Me)2)-T-7MeW-K(NMeAc)-Pen(3)-TMAPF-2Nal- |
| | Aib-K(NMeAc)-N-3Pya-Sar-CON(Me)2 |
| 342 | cPEG3aCO-Pen(3)-K(Me)3-T-7MeW-K(NMeAc)-Pen(3)-TMAPF-2nal-Achx- |
| | K(NMeAc)-N-3Pya-Sar-CON(Me)2 |
| 343 | 5cpaCO-Pen(3)-N(N(Me)2)-T-7MeW-K(NMeAc)-Pen(3)-TMAPF-2Nal-THP- |
| | K(NMeAc)-N-3Pya-Sar-CON(Me)2 |
| 344 | MeCO-hk(Me)3-Pen(3)-N(N(Me)2)-T-7MeW-K(NMeAc)-Pen(3)-TMAPF- |
| | 2Nal-THP-K(NMeAc)-N-3Pya-Sar-CON(Me)2 |
| 345 | MeCO-r-Pen(3)-N(N(Me)2)-T-7MeW-K(NMeAc)-Pen(3)-TMAPF-2Nal-THP- |
| | K(NMeAc)-N-3Pya-Sar-CON(Me)2 |
| 346 | cPEG3aCO-Pen(3)-N(N(Me)2)-T-7MeW-Cit-Pen(3)-TMAPF-2Nal-THP- |
| | K(NMeAc)-N-3Pya-Sar-CON(Me)2 |
| 347 | cPEG3aCO-k(PEG2PEG2gEC14)-Pen(3)-N(N(Me)2)-T-7MeW-K(Ac)-Pen(3)- |
| | TMAPF-2Nal-THP-K(NMeac)-N-3Pya-NMeK(PEG2PEG2gEC14)-CONH2 |
| 348 | cPEG3aCO-k(PEG2PEG2gEC12)-Pen(3)-N(N(Me)2)-T-7MeW-K(Ac)-Pen(3)- |
| | TMAPF-2Nal-THP-K(NMeac)-N-3Pya-NMeK(PEG2PEG2gEC12)-CONH2 |
| 349 | cPEG3aCO-Pen(3)-N-T-7MeW-K(Ac)-Pen(3)-TMAPF-2Nal-THP- |
| | K(PEG2PEG2gEC12)-N-3Pya-NMeK(PEG2PEG2gEC12)-CONH2 |
| 350 | C14gEPEG2PEG2CO-Pen(3)-N(N(Me)2)-T-7MeW-K(Ac)-Pen(3)-TMAPF- |
| | 2Nal-THP-K(NMeac)-N-3Pya-NMeK(PEG2PEG2gEC14)-CONH2 |
| 351 | cPEG3aCO-Pen(3)-N(N(Me)2)-T-7MeW-K(Ac)-Pen(3)-TMAPF-2Nal-THP- |
| | K(PEG2PEG2gEC14)-N-3Pya-NMeK(PEG2PEG2gEC14)-CONH2 |
| 352 | cPEG3aCO-Pen(3)-N(N(Me)2)-T-7MeW-K(PEG2PEG2gEC12)-Pen(3)- |
| | TMAPF-2Nal-THP-K(NMeac)-N-3Pya-NMeK(PEG2PEG2gEC12)-CONH2 |
| 353 | cPEG3aCO-Pen(3)-N(N(Me)2)-T-7MeW-K(Ac)-Pen(3)-TMAPF-2Nal-THP- |
| | K(PEG2PEG2gEC12)-N-3Pya-NMeK(PEG2PEG2gEC12)-CONH2 |
| 354 | C12gEPEG2PEG2CO-Pen(3)-N(N(Me)2)-T-7MeW-K(Ac)-Pen(3)-TMAPF- |
| | 2Nal-THP-K(NMeac)-N-3Pya-NMeK(PEG2PEG2gEC12)-CONH2 |
| 355 | cPEG3aCO-Pen(3)-N(N(Me)2)-T-7MeW-K(PEG2PEG2gEC14)-Pen(3)- |
| | TMAPF-2Nal-THP-K(NMeac)-N-3Pya-NMeK(PEG2PEG2gEC14)-CONH2 |
| 356 | cPEG3aCO-Pen(3)-K(PEG2PEG2gEC12)-T-7MeW-K(Ac)-Pen(3)-TMAPF- |
| | 2Nal-THP-K(NMeac)-N-3Pya-NMeK(PEG2PEG2gEC12)-CONH2 |
| 357 | cPEG3aCO-Pen(3)-K(PEG2PEG2gEC14)-T-7MeW-K(Ac)-Pen(3)-TMAPF- |
| | 2Nal-THP-K(NMeac)-N-3Pya-NMeK(PEG2PEG2gEC14)-CONH2 |
| 358 | cPEG3aCO-Pen(3)-N(N(Me)2)-t-7MeW-Dab(NMeAc)-Pen(3)-TMAPF-2Nal- |
| | THP-K(NMeAc)-N-3Pya-Sar-CON(Me)2 |
| 359 | cPEG3aCO-Pen(3)-N(N(Me)2)-T-7MeW-K(Ac)-Pen(3)-TMAPF-2Nal-THP- |
| | K(NMeac)-N-3Pya-NMeK(PEG2PEG2C14)-CONH2 |
| 360 | cPEG3aCO-Pen(3)-N(N(Me)2)-T-7MeW-K(Ac)-Pen(3)-TMAPF-2Nal-THP- |
| | K(NMeac)-N-3Pya-NMeK(PEG2PEG6gEC12)-CONH2 |
| 361 | cPEG3aCO-Pen(3)-N(N(Me)2)-T-7MeW-K(Ac)-Pen(3)-TMAPF-2Nal-THP- |
| | K(NMeac)-N-3Pya-NMeK(PEG2PEG6gEC14)-CONH2 |
| 362 | cPEG3aCO-Pen(3)-N(N(Me)2)-t-7MeW-Dab(NMeAc)-Pen(3)-TMAPF-2Nal- |
| | THP-K(NMeAc)-N-3Pya-Sar-CONH2 |
| 370 | cPEG3aCO-k(PEG2PEG6gEC12)-Pen(3)-N(N(Me)2)-T-7MeW-K(Ac)-Pen(3)- |
| | TMAPF-2Nal-THP-K(NMeac)-N-3Pya-NMeK(PEG2PEG6gEC12)-CONH2 |
| 371 | cPEG3aCO-Pen(3)-N-T-7MeW-K(Ac)-Pen(3)-TMAPF-2Nal-THP-K(NMeac)- |
| | N-3Pya-NMeK(PEG2PEG2gEC12)-CONH2 |
| 372 | cPEG3aCO-Pen(3)-N(N(Me)2)-T-7MeW-K(Ac)-Pen(3)-TMAPF-2Nal-THP- |
| | K(NMeac)-N-3Pya-NMeK(PEG2PEG2K(PEG2PEG2gEC12)2)-CONH2 |
| 373 | cPEG3aCO-Pen(3)-N(N(Me)2)-T-7MeW-K(Ac)-Pen(3)-TMAPF-2Nal-THP- |
| | K(PEG2PEG2PEG2gEC12))-N-3Pya-NMeK(PEG2PEG2PEG2gEC12)-CONH2 |
| 374 | C14gEPEG2PEG2CO-hk(Me)3-Pen(3)-K(PEG2PEG2gEC14)-T-7MeW- |
| | K(NMeAc)-Pen(3)-TMAPF-2Nal-THP-K(NMeAc)-N-3Pya-Sar-CON(Me)2 |
| 375 | C12gEPEG2PEG2CO-hk(Me)3-Pen(3)-N(N(Me)2)-T-7MeW-K(NMeAc)- |
| | Pen(3)-TMAPF-2Nal-THP-K(PEG2PEG2gEC12)-N-3Pya-Sar-CON(Me)2 |
| 376 | C14gEPEG2PEG2CO-hk(Me)3-Pen(3)-N(N(Me)2)-T-7MeW-K(NMeAc)- |
| | Pen(3)-TMAPF-2Nal-THP-K(PEG2PEG2gEC14)-N-3Pya-Sar-CON(Me)2 |
| 377 | C12gEPEG2PEG2CO-hk(Me)3-Pen(3)-N(N(Me)2)-T-7MeW-K(NMeAc)- |
| | Pen(3)-TMAPF-2Nal-K(PEG2PEG2gEC12)-N-3Pya-Sar-CON(Me)2 |
| 378 | cPEG3aCO-k(PEG2PEG2gEC12)-Pen(3)-N(N(Me)2)-T-7MeW-K(NMeAc)- |
| | Pen(3)-TMAPF-2Nal-THP-K(NMeAc)-N-3Pya-Sar-CON(Me)2 |
| 379 | cPEG3aCO-k(PEG2PEG2gEC14)-Pen(3)-N(N(Me)2)-T-7MeW-K(NMeAc)- |
| | Pen(3)-TMAPF-2Nal-THP-K(NMeAc)-N-3Pya-Sar-CON(Me)2 |
| 380 | cPEG3aCO-k(PEG2PEG2gEC12)-Pen(3)-K(PEG2PEG2gEC12)-T-7MeW- |
| | K(NMeAc)-Pen(3)-TMAPF-2Nal-THP-K(NMeAc)-N-3Pya-Sar-CON(Me)2 |
| 381 | cPEG3aCO-k(PEG2PEG2gEC14)-Pen(3)-K(PEG2PEG2gEC14)-T-7MeW- |
| | K(NMeAc)-Pen(3)-TMAPF-2Nal-THP-K(NMeAc)-N-3Pya-Sar-CON(Me)2 |
| 382 | cPEG3aCO-k(PEG2PEG2gEC12)-Pen(3)-N(N(Me)2)-T-7MeW- |
| | K(PEG2PEG2gEC12)-Pen(3)-TMAPF-2Nal-THP-K(NMeAc)-N-3Pya-Sar- |
| | CON(Me)2 |
| 384 | cPEG3aCO-Pen(3)-N(N(Me)2)-T-7MeW-K(cPEG3a)-Pen(3)-TMAPF-2Nal- |
| | THP-K(NMeAc)-N-3Pya-Sar-CON(Me)2 |
| 385 | C12gEPEG2PEG2CO-k(PEG2PEG2gEC12)-Pen(3)-N(N(Me)2)-t-7MeW- |
| | Dab(NMeAc)-Pen(3)-TMAPF-2Nal-THP-K(NMeAc)-N-3Pya-Sar-CON(Me)2 |
| 386 | C14gEPEG2PEG2CO-k(PEG2PEG2gEC14)-Pen(3)-N(N(Me)2)-t-7MeW- |
| | Dab(NMeAc)-Pen(3)-TMAPF-2Nal-THP-K(NMeAc)-N-3Pya-Sar-CON(Me)2 |
| 387 | cPEG3aCO-Pen(3)-K(PEG2PEG2gEC12)-T-7MeW-K(NMeAc)-Pen(3)-TMAPF- |
| | 2Nal-THP-K(NMeAc)-N-3Pya-Sar-CON(Me)2 |
| 388 | cPEG3aCO-Pen(3)-K(PEG2PEG2gEC14)-T-7MeW-K(NMeAc)-Pen(3)-TMAPF- |
| | 2Nal-THP-K(NMeAc)-N-3Pya-Sar-CON(Me)2 |
| 389 | cPEG3aCO-Pen(3)-K(PEG2PEG2gEC12)-T-7MeW-K(PEG2PEG2gEC12)- |
| | Pen(3)-TMAPF-2Nal-THP-K(NMeAc)-N-3Pya-Sar-CON(Me)2 |
| 390 | cPEG2gCO-Pen(3)-N(N(Me)2)-T-7MeW-K(NMeAc)-Pen(3)-TMAPF-2Nal- |
| | THP-K(NMeAc)-N-3Pya-Sar-CON(Me)2 |
| 391 | cPEG3gCO-Pen(3)-N(N(Me)2)-T-7MeW-K(NMeAc)-Pen(3)-TMAPF-2Nal- |
| | THP-K(NMeAc)-N-3Pya-Sar-CON(Me)2 |
| 392 | cPEG3aCO-Pen(3)-N(N(Me)2)-T-7MeW-K(4cpg)-Pen(3)-TMAPF-2Nal-THP- |
| | K(NMeAc)-N-3Pya-Sar-CON(Me)2 |
| 393 | cPEG3aCO-Pen(3)-K(cPEG3a)-T-7MeW-K(NMeAc)-Pen(3)-TMAPF-2Nal- |
| | THP-K(NMeAc)-N-3Pya-Sar-CON(Me)2 |
| 394 | cPEG3aCO-k(PEG2PEG2gEC12)-Pen(3)-N(N(Me)2)-T-7MeW-K(NMeAc)- |
| | Pen(3)-TMAPF-2Nal-THP-K(PEG2PEG2gEC12)-N-3Pya-Sar-CON(Me)2 |
| 395 | cPEG3aCO-k(PEG2PEG2gEC14)-Pen(3)-N(N(Me)2)-T-7MeW-K(NMeAc)- |
| | Pen(3)-TMAPF-2Nal-THP-K(PEG2PEG2gEC14)-N-3Pya-Sar-CON(Me)2 |
| 396 | cPEG3aCO-Pen(3)-K(PEG2PEG2gEC14)-T-7MeW-K(PEG2PEG2gEC14)- |
| | Pen(3)-TMAPF-2Nal-THP-K(NMeAc)-N-3Pya-Sar-CON(Me)2 |
| 397 | cPEG3aCO-Pen(3)-K(PEG2PEG2gEC12)-T-7MeW-K(NMeAc)-Pen(3)-TMAPF- |
| | 2Nal-THP-K(PEG2PEG2gEC12)-N-3Pya-Sar-CON(Me)2 |
| 398 | cPEG3aCO-Pen(3)-K(PEG2PEG2gEC14)-T-7MeW-K(NMeAc)-Pen(3)-TMAPF- |
| | 2Nal-THP-K(PEG2PEG2gEC14)-N-3Pya-Sar-CON(Me)2 |
| 399 | cPEG3aCO-Pen(3)-N(N(Me)2)-T-7MeW-K(PEG2PEG2gEC14)-Pen(3)- |
| | TMAPF-2Nal-THP-K(NMeAc)-N-3Pya-Sar-CON(Me)2 |
| 400 | cPEG3aCO-Pen(3)-N(N(Me)2)-T-7MeW-K(PEG2PEG2gEC12)-Pen(3)- |
| | TMAPF-2Nal-THP-K(PEG2PEG2gEC12)-N-3Pya-Sar-CON(Me)2 |
| 401 | cPEG3aCO-Pen(3)-N(N(Me)2)-T-7MeW-K(NMeAc)-Pen(3)-TMAPF-2Nal- |
| | THP-K(PEG2PEG2gEC12)-N-3Pya-Sar-CON(Me)2 |
| 402 | cPEG3aCO-Pen(3)-N(N(Me)2)-T-7MeW-K(NMeAc)-Pen(3)-TMAPF-2Nal- |
| | THP-K(PEG2PEG2gEC14)-N-3Pya-Sar-CON(Me)2 |
| 403 | 4cpgCO-Pen(3)-N(N(Me)2)-T-7MeW-K(NMeAc)-Pen(3)-TMAPF-2Nal-THP- |
| | K(NMeAc)-N-3Pya-Sar-CON(Me)2 |
| 404 | cPEG3aCO-k(PEG2PEG2PEG2PEG2gEC12)-Pen(3)-N(N(Me)2)-T-7MeW- |
| | K(Ac)-Pen(3)-TMAPF-2Nal-THP-K(NMeac)-N-3Pya- |
| | NMeK(PEG2PEG2PEG2PEG2gEC12)-CONH2 |
| 407 | cPEG3aCO-Pen(3)-N(N(Me)2)-T-7MeW-K(Ac)-Pen(3)-TMAPF-2Nal-THP- |
| | K(NMeac)-N-3Pya-NMeK(SP6PEG2PEG2C12)-CONH2 |
| 408 | cPEG3aCO-Pen(3)-N(N(Me)2)-T-7MeW-K(Ac)-Pen(3)-TMAPF-2Nal-THP- |
| | K(NMeac)-N-3Pya-NMeK(SP6PEG2PEG2gEC12)-CONH2 |
| 409 | cPEG3aCO-Pen(3)-N(N(Me)2)-T-7MeW-K(Ac)-Pen(3)-TMAPF-2Nal-THP- |
| | K(NMeac)-N-3Pya-NMeK(PEG2PEG2K(PEG2PEG2PEG2PEG2gEC12)2)- |
| | CONH2 |
| 410 | cPEG3aCO-Pen(3)-N(N(Me)2)-T-7MeW-K(PEG2PEG2gEC14)-Pen(3)- |
| | TMAPF-2Nal-THP-K(PEG2PEG2gEC14)-N-3Pya-Sar-CON(Me)2 |
| 414 | cPEG3aCO-Pen(3)-N(N(Me)2)-t-7MeW-Dap(NMeAc)-Pen(3)-TMAPF-2Nal- |
| | THP-K(NMeAc)-N-3Pya-Sar-CON(Me)2 |
| 415 | cPEG3aCO-Pen(3)-N(N(Me)2)-T-7MeW-K(Ac)-Pen(3)-TMAPF-2Nal-THP- |
| | Dap(NMeAc)-N-3Pya-Sar-CON(Me)2 |
| 427 | cPEG3aCO-Pen(3)-N-T-7MeW-K(Ac)-Pen(3)-TMAPF-2Nal-THP-E-N-3Pya- |
| | Sar-CONH2 |
| 428 | cPEG3aCO-Pen(3)-N-T-7MeW-K(Ac)-Pen(3)-TMAPF-2Nal-THP-K(Ac)-N- |
| | 3Pya-Sar-CONH2 |
| 430 | MeCO-Pen(3)-N-T-7MeW-K(Ac)-Pen(3)-TMAPF-2Nal-THP-E-N-3Pya-Sar- |
| | CONH2 |
| 444 | cPEG3aCO-Pen(3)-N-T-7(3NAcPh)W-K(Ac)-Pen(3)-TMAPF-2Nal-THP-E-N- |
| | 3Pya-Sar-CONH2 |
| 446 | MeCO-k(Me)3-Pen(3)-N-T-7MeW-K(Ac)-Pen(3)-TMAPF-2Nal-THP-E-N- |
| | 3Pya-Sar-CONH2 |
| 448 | MeCO-k(Me)3-Pen(3)-N-T-7(3NAcPh)W-K(Ac)-Pen(3)-TMAPF-2Nal-THP-E- |
| | N-3Pya-Sar-CONH2 |
| 450 | MeCO-k(Me)3-Pen(3)-N-T-7MeW-K(Ac)-Pen(3)-TMAPF-2Nal-THP-K(Ac)-N- |
| | 3Pya-Sar-CONH2 |
| 451 | MeCO-Pen(3)-N-T-7(3NAcPh)W-K(Ac)-Pen(3)-TMAPF-2Nal-THP-E-N-3Pya- |
| | Sar-CONH2 |
| 452 | MeCO-Pen(3)-N-T-7(3NAcPh)W-K(Ac)-Pen(3)-TMAPF-2Nal-THP-K(Ac)-N- |
| | 3Pya-Sar-CONH2 |
| 462 | MeCO-r-Pen(3)-N-T-7MeW-K(Ac)-Pen(3)-TMAPF-2Nal-THP-E-N-3Pya-Sar- |
| | CONH2 |

TABLE 1F
Compounds

| SEQ | Structure |
|---|---|
| ID NO: | Harmonized Sequences txt |
| 475 | [chemical structure] cPEG3aCO-Abu(1)-N(N(Me)2)-T-7MeW-K(NMeAc)-C(1)-APEG3F-2Nal-THP- K(NMeAc)-N-F-Sar-CON(Me)2 |
| 476 | [chemical structure] cPEG3aCO-Abu(1)-N(N(Me)2)-T-7MeW-K(NMeAc)-C(1)-APEG3F-2Nal-THP- K(NMeAc)-N-A-Sar-CON(Me)2 |
| 477 | [chemical structure] MeCO-Abu(1)-N-T-7(3NAcPh)W-K(Ac)-aMeC(1)-TMAPF-2Nal-THP-K(Ac)-N- 3Pya-Sar-CONH2 |
| 478 | [chemical structure] MeCO-C(3)-N-T-7MeW-K(Ac)-aMeC(3)-TMAPF-2Nal-THP-K(Ac)-N-3Pya-Sar- CONH2 |
| 479 | [chemical structure] cPEG3aCO-Pen(3)-N(N(Me)2)-T-7MeW-K(NMeAc)-Pen(3)-F(4TzIMMo7)-2Nal- THP-K(NMeAc)-N-3Pya-Sar-CON(Me)2 |
| 480 | [chemical structure] MeCO-k(Me)3-Pen(3)-N-T-7(3NAcPh)W-K(Ac)-Pen(3)-AEF(G)-2Nal-THP-E-N- 5MePyridinAla-Sar-CONH2 |
| 481 | [chemical structure] cPEG3aCO-Pen(3)-N-T-7(3NAcPh)W-K(Ac)-Pen(3)-AEF(G)-2Nal-THP- K(NMeAc)-N-5MePyridinAla-Sar-CONH2 |
| 482 | [chemical structure] MeCO-Pen(3)-N-T-7(3NAcPh)W-K(Ac)-Pen(3)-AEF(G)-2Nal-THP-K(NMeAc)- N-5MePyridinAla-Sar-CONH2 |
| 483 | [chemical structure] cPEG3aCO-C(3)-N(N(Me)2)-T-7MeW-K(NMeAc)-C(3)-TMAPF-2Nal-THP- K(NMeAc)-N-3Pya-Sar-CON(Me)2 |
| 484 | [chemical structure] cPEG3aCO-C(3)-N(N(Me)2)-T-7MeW-K(NMeAc)-Pen(3)-TMAPF-2Nal-THP- K(NMeAc)-N-3Pya-Sar-CON(Me)2 |
| 485 | [chemical structure] cPEG3aCO-Pen(3)-N(N(Me)2)-T-7MeW-K(NMeAc)-C(3)-TMAPF-2Nal-THP- K(NMeAc)-N-3Pya-Sar-CON(Me)2 |
| 486 | [chemical structure] cPEG3aCO-Pen(3)-N(N(Me)2)-T-7MeW-K(NMeAc)-Pen(3)-F(4TzlTMA7)-2Nal- THP-K(NMeAc)-N-3Pya-Sar-CON(Me)2 |
| 487 | [chemical structure] cPEG3aCO-Pen(3)-N(N(Me)2)-T-7MeW-K(NMeAc)-Pen(3)-TMAPf-2Nal-L- K(NMeAc)-N-3Pya-Sar-CON(Me)2 |
| 488 | [chemical structure] cPEG3aCO-Pen(3)-N(N(Me)2)-T-7MeW-K(NMeAc)-Pen(3)-TMAPf-2Nal-A- K(NMeAc)-N-3Pya-Sar-CON(Me)2 |
| 489 | [chemical structure] cPEG3aCO-Pen(3)-N(N(Me)2)-T-7MeW-L-Pen(3)-TMAPF-2Nal-THP- K(NMeAc)-N-3Pya-Sar-CON(Me)2 |
| 490 | [chemical structure] DFNPEG2PEG2CO-Pen(3)-N-T-7MeW-K(Ac)-Pen(3)-TMAPF-2Nal-THP-K(Ac)- N-3Pya-Sar-CONH2 |
| 491 | [chemical structure] IPBPEG2PEG2CO-Pen(3)-N-T-7MeW-K(Ac)-Pen(3)-TMAPF-2Nal-THP-K(Ac)- N-3Pya-Sar-CONH2 |
| 492 | [chemical structure] cPEG3aCO-Pen(3)-N(N(Me)2)-T-7MeW-A-Pen(3)-TMAPF-2Nal-THP- K(NMeAc)-N-3Pya-Sar-CON(Me)2 |
| 493 | [chemical structure] cPEG3aCO-Pen(3)-N(N(Me)2)-L-7MeW-K(NMeAc)-Pen(3)-TMAPF-2Nal-THP- K(NMeAc)-N-3Pya-Sar-CON(Me)2 |
| 494 | [chemical structure] cPEG3aCO-Pen(3)-N(N(Me)2)-A-7MeW-K(NMeAc)-Pen(3)-TMAPF-2Nal-THP- K(NMeAc)-N-3Pya-Sar-CON(Me)2 |
| 495 | [chemical structure] cPEG3aCO-Pen(3)-1-T-7MeW-K(NMeAc)-Pen(3)-TMAPF-2Nal-THP-K(NMeAc)- N-3Pya-Sar-CON(Me)2 |
| 496 | [chemical structure] cPEG3aCO-Pen(3)-a-T-7MeW-K(NMeAc)-Pen(3)-TMAPF-2Nal-THP-K(NMeAc)- N-3Pya-Sar-CON(Me)2 |
| 497 | [chemical structure] cPEG3aCO-Pen(3)-N(N(Me)2)-T-7MeW-K(NMeAc)-Pen(3)-TMApF-W-THP- K(NMeAc)-N-3Pya-Sar-CON(Me)2 |
| 498 | [chemical structure] cPEG3aCO-Pen(3)-N(N(Me)2)-T-7MeW-K(NMeAc)-Pen(3)-TMApF-F-THP- K(NMeAc)-N-3Pya-Sar-CON(Me)2 |
| 499 | [chemical structure] cPEG3aCO-Pen(3)-N(N(Me)2)-T-7MeW-K(NMeAc)-Pen(3)-TMApF-L-THP- K(NMeAc)-N-3Pya-Sar-CON(Me)2 |
| 500 | [chemical structure] cPEG3aCO-Pen(3)-N(N(Me)2)-T-7MeW-K(NMeAc)-Pen(3)-TMApF-A-THP- K(NMeAc)-N-3Pya-Sar-CON(Me)2 |
| 501 | [chemical structure] cPEG3aCO-Pen(3)-N-T-7(3NAcPh)W-K(Ac)-Pen(3)-TMAPF-2Nal-THP- K(NMeAc)-N-5MePyridinAla-Sar-CONH2 |
| 502 | [chemical structure] MeCO-Pen(3)-N-T-7(3NAcPh)W-K(Ac)-Pen(3)-TMAPF-2Nal-THP-K(NMeAc)- N-5MePyridinAla-Sar-CONH2 |
| 503 | [chemical structure] MeCO-Pen(3)-N-T-7(3NAcPh)W-K(Ac)-Pen(3)-TMAPF-2Nal-THP-K(Ac)-N- 5MePyridinAla-Sar-CONH2 |
| 504 | [chemical structure] MeCO-Pen(3)-N-T-7(3NAcPh)W-K(Ac)-Pen(3)-TMAPF-2Nal-THP-E-N- 5MePyridinAla-Sar-CONH2 |
| 505 | [chemical structure] cPEG3aCO-Pen(3)-N-T-7MeW-K(Ac)-Pen(3)-TMAPF-2Nal-THP-E-N- 5MePyridinAla-Sar-CONH2 |
| 506 | [chemical structure] cPEG3aCO-Pen(3)-N-T-7MeW-K(Ac)-Pen(3)-AEF-2Nal-THP-E-N- 5MePyridinAla-Sar-CONH2 |
| 507 | [chemical structure] cPEG3aCO-Pen(3)-N(N(Me)2)-T-W-K(NMeAc)-Pen(3)-TMAPF-2Nal-THP- K(NMeAc)-N-3Pya-Sar-CONMe2 |
| 508 | [chemical structure] cPEG3aCO-r-Pen(3)-N-T-7MeW-K(Ac)-Pen(3)-AEF(G)-2Nal-THP-E-N- 5MePyridinAla-Sar-CONH2 |
| 509 | [chemical structure] cPEG3aCO-Pen(3)-N(N(Me)2)-T-2Nal-K(NMeAc)-Pen(3)-TMAPF-2Nal-THP- K(NMeAc)-N-3Pya-Sar-CONMe2 |
| 510 | [chemical structure] cPEG3aCO-Pen(3)-N(N(Me)2)-T-F-K(NMeAc)-Pen(3)-TMAPF-2Nal-THP- K(NMeAc)-N-3Pya-Sar-CONMe2 |
| 511 | [chemical structure] cPEG3aCO-Pen(3)-N(N(Me)2)-T-L-K(NMeAc)-Pen(3)-TMAPF-2Nal-THP- K(NMeAc)-N-3Pya-Sar-CONMe2 |
| 512 | [chemical structure] cPEG3aCO-Pen(3)-N(N(Me)2)-T-A-K(NMeAc)-Pen(3)-TMAPF-2Nal-THP- K(NMeAc)-N-3Pya-Sar-CONMe2 |
| 513 | [chemical structure] MeCO-k(Me)3-Pen(3)-N-T-7(3NAcPh)W-K(Ac)-Pen(3)-TMAPF-2Nal-THP-E-N- 5MePyridinAla-Sar-CONH2 |
| 514 | [chemical structure] cPEG3aCO-Pen(3)-N-T-7MeW-K(Ac)-Pen(3)-AEF(G)-2Nal-THP-E-N- 5MePyridinAla-Sar-CONH2 |
| 515 | [chemical structure] MeCO-Pen(3)-N-T-7(3NAcPh)W-K(Ac)-Pen(3)-AEF(G)-2Nal-THP-K(NMeAc)- N-3Pya-Sar-CONH2 |
| 516 | [chemical structure] cPEG3aCO-r-Abu(1)-N-T-W-K(Ac)-aMeC(1)-TMAPF-2Nal-THP-E-N-3Pya-Sar- CONH2 |
| 517 | [chemical structure] MeCO-k(Me)3-Abu(1)-N-T-W-K(Ac)-aMeC(1)-TMAPF-2Nal-THP-K(Ac)-N- 3Pya-Sar-CONH2 |
| 518 | [chemical structure] cPEG3aCO-r-Abu(1)-N-T-W-K(Ac)-aMeC(1)-TMAPF-2Nal-THP-K(Ac-N-3Pya- Sar-CONH2 |
| 519 | [chemical structure] cPEG3aCO-Pen(3)-N-T-7(3NAcPh)W-K(Ac)-Pen(3)-AEF(G)-2Nal-THP- K(NMeAc)-N-3Pya-Sar-CONH2 |
| 520 | [chemical structure] cPEG3aCO-Pen(3)-N(N(Me)2)-T-7MeW-K(NMeAc)-Pen(3)-APEG3F-2Nal-THP- Nle-N-3Pya-Sar-CON(Me)2 |
| 521 | [chemical structure] cPEG3aCO-Pen(3)-N-T-7MeW-K(Ac)-Pen(3)-F(4TzlG2)-2Nal-THP-K(Ac)-N- 3Pya-Sar-CONH2 |
| 522 | [chemical structure] cPEG3aCO-Pen(3)-N-T-7MeW-K(Ac)-Pen(3)-F(4TzlAme2)-2Nal-THP-K(Ac)-N- 3Pya-Sar-CONH2 |
| 523 | [chemical structure] cPEG3aCO-Abu(1)-N(N(Me)2)-T-7MeW-K(NMeAc)-C(1)-TMAPF-2Nal-THP- K(NMeAc)-N-3Pya-Sar-CON(Me)2 |
| 524 | [chemical structure] DFNCO-Pen(3)-N-T-7MeW-K(Ac)-Pen(3)-TMAPF-2Nal-THP-K(IPB)-N-3Pya- Sar-CONH2 |
| 525 | [chemical structure] IPBCO-Pen(3)-N-T-7MeW-K(Ac)-Pen(3)-TMAPF-2Nal-THP-K(DFN)-N-3Pya- Sar-CONH2 |
| 526 | [chemical structure] MeCO-Pen(3)-N-T-7MeW-K(Ac)-Pen(3)-TMAPF-2Nal-THP-K(DFN)-N-3Pya- Sar-CONH2 |
| 527 | [chemical structure] DFNCO-Pen(3)-N-T-7MeW-K(Ac)-Pen(3)-TMAPF-2Nal-THP-K(Ac)-N-3Pya-Sar- CONH2 |
| 528 | [chemical structure] cPEG3aCO-Pen(3)-N(N(Me)2)-T-7MeW-K(NMeAc)-Pen(3)-APF-2Nal-THP- K(NMeAc)-N-3Pya-Sar-CON(Me)2 |
| 529 | [chemical structure] cPEG3AmCO-Pen(3)-N(N(Me)2)-T-7MeW-K(NMeAc)-Pen(3)-APF-2Nal-THP- K(NMeAc)-N-3Pya-Sar-CON(Me)2 |
| 530 | [chemical structure] MeCO-Pen(3)-N-T-7MeW-K(Ac)-Pen(3)-ACHMF(S*, S*)-2Nal-THP-K(Ac)-N- 3Pya-Sar-CONH2 |
| 531 | [chemical structure] MeCO-Pen(3)-N-T-7MeW-K(Ac)-Pen(3)-ACHMF(R*, S*)-2Nal-THP-K(Ac)-N- 3Pya-Sar-CONH2 |
| 532 | [chemical structure] MeCO-r-Pen(3)-N-T-7MeW-K(Ac)-Pen(3)-TMAPF-2Nal-THP-K(Ac)-N- 5MePyridinAla-Sar-CONH2 |
| 533 | [chemical structure] MeCO-k(Me)3-Pen(3)-N-T-7MeW-K(Ac)-Pen(3)-AEF-2Nal-THP-K(Ac)-N- 5MePyridinAla-Sar-CONH2 |
| 534 | [chemical structure] MeCO-k(Me)3-Pen(3)-N-T-7MeW-K(Ac)-Pen(3)-TMAPF-2Nal-THP-E-N- 5MePyridinAla-Sar-CONH2 |
| 535 | [chemical structure] MeCO-k(Me)3-Pen(3)-N-T-7(3NAcPh)W-K(Ac)-Pen(3)-AEF-2Nal-THP-E-N- 5MePyridinAla-Sar-CONH2 |
| 536 | [chemical structure] cPEG3aCO-r-Pen(3)-N-T-7(3NAcPh)W-K(Ac)-Pen(3)-AEF-2Nal-THP-E-N- 5MePyridinAla-Sar-CONH2 |
| 537 | [chemical structure] MeCO-Pen(3)-N-T-7MeW-K(Ac)-Pen(3)-TMAPF-2Nal-Acpx-K(Ac)-N-3Pya-Sar- CONH2 |
| 538 | [chemical structure] MeCO-Pen(3)-N-T-7MeW-K(Ac)-Pen(3)-TMAPF-2Nal-Achx-K(Ac)-N-3Pya-Sar- CONH2 |
| 539 | [chemical structure] MeCO-Pen(3)-N-T-7MeW-K(Ac)-Pen(3)-TMAPF-2Nal-diFAchx-K(Ac)-N-3Pya- Sar-CONH2 |
| 540 | [chemical structure] MeCO-r-Pen(3)-N-T-7(3NAcPh)W-K(Ac)-Pen(3)-TMAPF-2Nal-THP-E-N- 5MePyridinAla-Sar-CONH2 |
| 541 | [chemical structure] cPEG3aCO-r-Pen(3)-N-T-7MeW-K(Ac)-Pen(3)-AEF-2Nal-THP-K(Ac)-N- 5MePyridinAla-Sar-CONH2 |
| 542 | [chemical structure] cPEG3aCO-r-Pen(3)-N-T-7MeW-K(Ac)-Pen(3)-TMAPF-2Nal-THP-E-N- 5MePyridinAla-Sar-CONH2 |
| 543 | [chemical structure] MeCO-r-Pen(3)-N-T-7MeW-K(Ac)-Pen(3)-TMAPF-2Nal-THP-E-N- 5MePyridinAla-Sar-CONH2 |
| 544 | [chemical structure] cPEG3aCO-Pen(3)-N(N(Me)2)-T-7MeW-K(cPEG3aCO)-Pen(3)-APEG3F-2Nal- THP-K(NMeAc)-N-3Pya-Sar-CON(Me)2 |
| 545 | [chemical structure] MeCO-APEG2Ser(RS)-Pen(3)-N(N(Me)2)-T-7MeW-K(NMeAc)-Pen(3)- Y(OTzlTMA4)-2Nal-THP-K(NMeAc)-N-3Pya-Sar-CON(Me)2 |
| 546 | [chemical structure] MeCO-Pen(3)-N-T-7MeW-K(Ac)-Pen(3)-TMAPF-2Nal-THP-K(IPB)-N-3Pya-Sar- CONH2 |
| 547 | [chemical structure] IPBCO-Pen(3)-N-T-7MeW-K(Ac)-Pen(3)-TMAPF-2Nal-THP-K(Ac)-N-3Pya-Sar- CONH2 |
| 548 | [chemical structure] cPEG3aCO-r-Abu(1)-N-T-W-K(Ac)-aMeC(1)-AEF-2Nal-THP-K(Ac-N-3Pya-Sar- CONH2 |
| 550 | [chemical structure] MeCO-Pen(3)-N-T-7MeW-K(Ac)-Pen(3)-TMA4F-2Nal-THP-N-3Pya-Sar-CONH2 |

551 [chemical structure] cPEG3aCO-Pen(3)-N-T-7MeW-K(Ac)-Pen(3)-YCF2H-2Nal-THP-K(Ac- N-3Pya-Sar-CONH2

| | |
|---|---|
| 552 | [chemical structure] MeCO-gPEG2Ser-Pen(3)-N(N(Me)2)-T-7MeW-K(NMeAc)-Pen(3)-APEG3F-2Nal- THP-K(NMeAc)-N-3Pya-Sar-CON(Me)2 |
| 553 | [chemical structure] MeCO-APEG2Ser(RS)-Pen(3)-N-T-7MeW-K(Ac)-Pen(3)-AEF-2Nal-THP-E-N- 3Pya-Sar-CONH2 |
| 554 | [chemical structure] MeCO-APEG2Ser(RS)-Pen(3)-N-T-7MeW-K(Ac)-Pen(3)-AEF-2Nal-THP-K(Ac)- N-3Pya-Sar-CONH2 |
| 555 | [chemical structure] MeCO-APEG2Ser(RS)-Pen(3)-N-T-7MeW-K(Ac)-Pen(3)-TMAPF-2Nal-THP-E-N- 3Pya-Sar-CONH2 |
| 556 | [chemical structure] MeCO-APEG2Ser(RS)-Pen(3)-N-T-7MeW-K(Ac)-Pen(3)-TMAPF-2Nal-THP- K(Ac)-N-3Pya-Sar-CONH2 |
| 557 | [chemical structure] cPEG3aCO-Pen(3)-N(N(Me)2)-T-A-K(NMeAc)-Pen(3)-APEG3F-A-THP- K(NMeAc)-N-3Pya-Sar-CON(Me)2 |
| 558 | [chemical structure] MeCO-r-Pen(3)-N-T-7MeW-K(Ac)-Pen(3)-TMAPF-2Nal-THP-K(Ac)-N-3Pya-Sar- CONH2 |
| 559 | [chemical structure] cPEG3AmCO-Pen(3)-N(N(Me)2)-T-7MeW-K(NMeAc)-Pen(3)-TMAPF-2Nal- THP-K(NMeAc)-N-3Pya-Sar-CON(Me)2 |
| 560 | [chemical structure] cPEG3aCO-Pen(3)-N(N(Me)2)-T-7MeW-K(NMeAc)-Pen(3)-TMAPF-2Nal-THP- k(NMeAc)-N(NMe)-3Pya-Sar-CON(Me)2 |
| 561 | [chemical structure] MeCO-Pen(3)-N-T-7MeW-K(Ac)-pen(3)-AEF(NMe3)-2Nal-THP-K(Ac)-N-3Pya- Sar-CONH2 |
| 562 | [chemical structure] MeCO-Pen(3)-N-T-7MeW-K(Ac)-Pen(3)-MMoEF-2Nal-THP-K(Ac)-N-3Pya-Sar- CONH2 |
| 563 | [chemical structure] MeCO-k(Me)3-Pen(3)-N-T-7(3NAcPh)W-K(Ac)-Pen(3)-AEF(G)-2Nal-THP-E-N- 3Pya-Sar-CONH2 |
| 564 | [chemical structure] cPEG3aCO-Pen(3)-N(N(Me)2)-T-W-K(NMeAc)-Pen(3)-APEG3F-W-THP- K(NMeAc)-N-3Pya-Sar-CON(Me)2 |
| 565 | [chemical structure] cPEG3aCO-Pen(3)-N(N(Me)2)-T-F-K(NMeAc)-Pen(3)-APEG3F-F-THP- K(NMeAc)-N-3Pya-Sar-CON(Me)2 |
| 566 | [chemical structure] cPEG3aCO-Pen(3)-N(N(Me)2)-T-L-K(NMeAc)-Pen(3)-APEG3F-L-THP- K(NMeAc)-N-3Pya-Sar-CON(Me)2 |
| 567 | [chemical structure] MeCO-k(Me)3-Abu(1)-N-T-W-K(Ac)-aMeC(1)-TMAPF-2Nal-THP-E-N-3Pya-Sar- CONH2 |
| 568 | [chemical structure] MeCO-r-Abu(1)-N-T-W-K(Ac)-aMeC(1)-TMAPF-2Nal-THP-K(Ac)-N-3Pya-Sar- CONH2 |
| 569 | [chemical structure] MeCO-k(Me)3-Abu(1)-N-T-W-K(Ac)-aMeC(1)-AEF-2Nal-THP-K(Ac)-N-3Pya- Sar-CONH2 |
| 570 | [chemical structure] C14gEPEG2PEG2CO-hk(Me)3-Pen(3)-N(N(Me)2)-T-7MeW-K(NMeAc)-Pen(3)- TMAPF-2Nal-K(PEG2PEG2gEC14)-N-3Pya-Sar-CON(Me)2 |
| 571 | [chemical structure] cPEG3aCO-Pen(3)-N(N(Me)2)-T-7MeW-K(NMeAc)-Pen(3)-AEF(cPEG3a)-2Nal- THP-K(NMeAc)-N-3Pya-Sar-CONMe2 |
| 572 | [chemical structure] MeCO-canEG2PEG2gE(c)C12-Pen(3)-N-T-7MeW-K(Ac)-Pen(3)-AEF-2Nal-THP- K(Ac)-N-3Pya-Sar-CONH2 |
| 573 | [chemical structure] cPEG3aCO-Pen(3)-N(N(Me)2)-T-7MeW-K(NMeAc)-Pen(3)-APEG3F-2Nal-THP- K(NMeAc)-N-F-Sar-CON(Me)2 |
| 574 | [chemical structure] cPEG3aCO-Pen(3)-N(N(Me)2)-T-7MeW-K(NMeAc)-Pen(3)-APEG3F-2Nal-THP- K(NMeAc)-N-A-Sar-CON(Me)2 |

### SYNTHESIS

[0726] The compounds described herein may be synthesized by many techniques that are known to those skilled in the art. In certain aspects, monomer subunits are synthesized and purified using the techniques described in the accompanying Examples. In some aspects, the present invention provides a method of producing a compound (or monomer subunit thereof) of the invention, comprising chemically synthesizing a peptide having an amino acid sequence described herein, including but not limited to any of the amino acid sequences set forth in the compounds of Formula (I) to Formula (VI), Table IA, Table 11B, Table IC, Table ID, and Table IE herein. In some aspects, a portion of the peptide is recombinantly synthesized, instead of being chemically synthesized. In some aspects, methods of producing a compound further include cyclizing the compound precursor after the constituent subunits have been attached. In particular aspects, cyclization is accomplished via any of the various methods described herein.

[0727] Substituted tryptophans may be prepared by any suitable route. Preparation of certain substituted tryptophans including those substituted at the 7 position, such as 7-ethyl-L-tryptophans, are described in, for example WO 2021/146441 A1.

[0728] The present invention further describes synthesis of compounds described herein, such as the compounds of Formulae (I) to (X) and the compounds of Table 1A, Table 1A, Table 1B, Table 1C, Table 1D, and Table 1E. In some aspects, one or more of the amino acid residues or amino acid monomers are lipidated and then covalently attached to one another to form a compound of the invention. In some aspects, one or more of the amino acid residues or amino acid monomers are covalently attached to one another and lipidated at an intermediate oligomer stage before attaching additional amino acids and cyclization to form a compound of the invention. In some aspects, a cyclic peptide is synthesized and then lipidated to form a compound of the invention. Illustrative synthetic methods are described in the Examples.

[0729] The present invention further describes synthesis of compounds described herein, such as the compounds of Formulae (I) to Formula (X), and the compounds of Table 1A, Table 1B, Table 1C, Table 1D, and Table 1E. Illustrative synthetic methods are described in the Examples.

### IV. Pharmaceutical Compositions

[0730] The present invention relates to pharmaceutical composition which comprise an IL-23R inhibitor of the present invention. The present invention includes pharmaceutical compositions comprising one or more inhibitors of the present invention and a pharmaceutically acceptable carrier, diluent or excipient. The pharmaceutically acceptable carrier, diluent or excipient may be a solid, semi-solid or liquid filler, diluent, encapsulating material or formulation auxiliary of any type. Prevention of the action of microorganisms may be ensured by the inclusion of various antibacterial and antifungal agents, for example, paraben, chlorobutanol, phenol sorbic acid, and the like. It may also be desirable to include isotonic agents such as sugars, sodium chloride, and the like.

[0731] The pharmaceutical compositions may be administered orally, parenterally, intracisternally, intravaginally, intraperitoneally, intrarectally, topically (as by powders, ointments, drops, suppository, or transdermal patch), by inhalation (such as intranasal spray), ocularly (such as intraocularly) or buccally. The term “parenteral” as used herein refers to modes of administration which include intravenous, intramuscular, intraperitoneal, intrasternal, subcutaneous, intradermal and intraarticular injection and infusion. Accordingly, in certain embodiments, the compositions are formulated for delivery by any of these routes of administration. A pharmaceutical composition may be formulated for and administered orally. A pharmaceutical composition may be formulated for and administered parenterally.

[0732] In a particular aspect, an IL-23R inhibitor of the present invention, is suspended in a sustained-release matrix. A sustained-release matrix, as used herein, is a matrix made of materials, usually polymers, which are degradable by enzymatic or acid-base hydrolysis or by dissolution. Once inserted into the body, the matrix is acted upon by enzymes and body fluids. A sustained-release matrix desirably is chosen from biocompatible materials such as liposomes, polylactides (polylactic acid), polyglycolide (polymer of glycolic acid), polylactide co-glycolide (copolymers of lactic acid and glycolic acid) polyanhydrides, poly(ortho)esters, polypeptides, hyaluronic acid, collagen, chondroitin sulfate, carboxylic acids, fatty acids, phospholipids, polysaccharides, nucleic acids, polyamino acids, amino acids such as phenylalanine, tyrosine, isoleucine, polynucleotides, polyvinyl propylene, polyvinylpyrrolidone and silicone. One embodiment of a biodegradable matrix is a matrix of one of either polylactide, polyglycolide, or polylactide co-glycolide (co-polymers of lactic acid and glycolic acid).

[0733] The IL-23R inhibitors of the present invention may be prepared and/or formulated as pharmaceutically acceptable salts or when appropriate in neutral form. Pharmaceutically acceptable salts are non-toxic salts of a neutral form of a compound that possess the desired pharmacological activity of the neutral form. These salts may be derived from inorganic or organic acids or bases. For example, a compound that contains a basic nitrogen may be prepared as a pharmaceutically acceptable salt by contacting the compound with an inorganic or organic acid. Non-limiting examples of pharmaceutically acceptable salts include sulfates, pyrosulfates, bisulfates, sulfites, bisulfites, phosphates, monohydrogen-phosphates, dihydrogenphosphates, metaphosphates, pyrophosphates, chlorides, bromides, iodides, acetates, propionates, decanoates, caprylates, acrylates, formates, isobutyrates, caproates, heptanoates, propiolates, oxalates, malonates, succinates, suberates, sebacates, fumarates, maleates, butyne-1,4-dioates, hexyne-1,6-dioates, benzoates, chlorobenzoates, methylbenzoates, dinitrobenzoates, hydroxybenzoates, methoxybenzoates, phthalates, sulfonates, methylsulfonates, propylsulfonates, besylates, xylenesulfonates, naphthalene-1-sulfonates, naphthalene-2-sulfonates, phenylacetates, phenylpropionates, phenylbutyrates, citrates, lactates, 7-hydroxybutyrates, glycolates, tartrates, and mandelates. Lists of other suitable pharmaceutically acceptable salts are found in Remington: The Science and Practice of Pharmacy, 21^{st} Edition, Lippincott Wiliams and Wilkins, Philadelphia, Pa., 2006.

[0734] Examples of “pharmaceutically acceptable salts” of the compounds disclosed herein also include salts derived from an appropriate base, such as an alkali metal (for example, sodium, potassium), an alkaline earth metal (for example, magnesium), ammonium and NX₄⁺(wherein X is C₁-C₄ alkyl). Also included are base addition salts, such as sodium or potassium salts. Those skilled in the art will recognize that while quaternary amonium salts may be incorporated into the structure of the compound of Formula (I) - (VI), remaining basic residues may be combined with an acid form additional salt sites. Thus, a compound of Formula (I) - (VI) of the present invention may encompass quarternary ammonium salts at certain positions, but also acid addition salts at any basic site on the molecule.

[0735] The pesent invention relates to pharmaceutical compositions comprising an IL-23R inhibitor of the present invention or pharmaceutically acceptable salts, isomers, or a mixture thereof, in which from 1 to n hydrogen atoms attached to a carbon atom may be replaced by a deuterium atom or D, in which n is the number of hydrogen atoms in the molecule. As known in the art, the deuterium atom is a non-radioactive isotope of the hydrogen atom. Such compounds may increase resistance to metabolism, and thus may be useful for increasing the half-life of the compounds described herein or pharmaceutically acceptable salts, isomer, or a mixture thereof when administered to a mammal. See, e.g., Foster, “Deuterium Isotope Effects in Studies of Drug Metabolism,” Trends Pharmacol. Sci., 5(12):524-527 (1984). Such compounds are synthesized by means well known in the art, for example by employing starting materials in which one or more hydrogen atoms have been replaced by deuterium.

[0736] Examples of isotopes that can be incorporated into the disclosed compounds also include isotopes of hydrogen, carbon, nitrogen, oxygen, phosphorous, fluorine, chlorine, and iodine, such as ²H, ³H, C, ¹¹C, ¹³C, ¹⁴N, ¹⁵N, ¹⁵O, ¹⁷O, ¹⁸O, ³¹P, ³²P ³⁵S, ¹⁸F, ³⁶Cl, ¹²³I, and ¹²⁵I, respectively. Substitution with positron emitting isotopes, such as ¹¹C, ¹⁸F, ¹⁵0 and ¹³N, can be useful in Positron Emission Topography (PET) studies for examining substrate receptor occupancy. Isotopically-labeled compounds of Formula (I), can generally be prepared by conventional techniques known to those skilled in the art or by processes analogous to those described in the Examples as set out below using an appropriate isotopically-labeled reagent in place of the non-labeled reagent previously employed.

[0737] In certain aspects, pharmaceutical compositions for parenteral injection comprise pharmaceutically acceptable sterile aqueous or nonaqueous solutions, dispersions, suspensions or emulsions, or sterile powders, for reconstitution into sterile injectable solutions or dispersions just prior to use. Examples of suitable aqueous and nonaqueous carriers, diluents, solvents or vehicles include water, ethanol, polyols (such as glycerol, propylene glycol, polyethylene glycol, and the like), carboxymethylcellulose and suitable mixtures thereof, β-cyclodextrin, vegetable oils (such as olive oil), and injectable organic esters such as ethyl oleate. Proper fluidity may be maintained, for example, by the use of coating materials such as lecithin, by the maintenance of the required particle size in the case of dispersions, and by the use of surfactants. These compositions may also contain adjuvants such as preservative, wetting agents, emulsifying agents, and dispersing agents. Prolonged absorption of an injectable pharmaceutical form may be brought about by the inclusion of agents which delay absorption, such as aluminum monostearate and gelatin.

[0738] Injectable depot forms include those made by forming microencapsulated matrices of the peptide inhibitor in one or more biodegradable polymers such as polylactide-polyglycolide, poly(orthoesters), poly(anhydrides), and (poly)glycols, such as PEG.

[0739] Depending upon the ratio of peptide to polymer and the nature of the particular polymer employed, the rate of release of the peptide inhibitor can be controlled. Depot injectable formulations are also prepared by entrapping the peptide inhibitor in liposomes or microemulsions compatible with body tissues.

[0740] The injectable formulations may be sterilized, for example, by filtration through a bacterial-retaining filter, or by incorporating sterilizing agents in the form of sterile solid compositions which can be dissolved or dispersed in sterile water or other sterile injectable medium just prior to use.

[0741] Topical administration includes administration to the skin or mucosa, including surfaces of the lung and eye. Compositions for topical lung administration, including those for inhalation and intranasal, may involve solutions and suspensions in aqueous and non-aqueous formulations and can be prepared as a dry powder which may be pressurized or non-pressurized. In non-pressurized powder compositions, the active ingredient may be finely divided form may be used in admixture with a larger-sized pharmaceutically acceptable inert carrier comprising particles having a size, for example, of up to 100 micrometers in diameter. Suitable inert carriers include sugars such as lactose.

[0742] Alternatively, a pharmaceutical composition of the present invention may be pressurized and contain a compressed gas, such as nitrogen or a liquefied gas propellant. The liquefied propellant medium and indeed the total composition may be such that the active ingredient does not dissolve therein to any substantial extent. The pressurized composition may also contain a surface active agent, such as a liquid or solid non-ionic surface active agent or may be a solid anionic surface active agent. It is preferred to use the solid anionic surface active agent in the form of a sodium salt.

[0743] A further form of topical administration is to the eye. A peptide inhibitor of the present invention may be delivered in a pharmaceutically acceptable ophthalmic vehicle, such that the peptide inhibitor is maintained in contact with the ocular surface for a sufficient time period to allow the peptide inhibitor to penetrate the corneal and internal regions of the eye, as for example the anterior chamber, posterior chamber, vitreous body, aqueous humor, vitreous humor, cornea, iris/ciliary, lens, choroid/retina and sclera. The pharmaceutically acceptable ophthalmic vehicle may, for example, be an ointment, vegetable oil or an encapsulating material. Alternatively, the peptide inhibitors of the invention may be injected directly into the vitreous and aqueous humor.

[0744] Compositions for rectal or vaginal administration include suppositories which may be prepared by mixing the peptide inhibitors of this invention with suitable non-irritating excipients or carriers such as cocoa butter, polyethylene glycol or a suppository wax, which are solid at room temperature but liquid at body temperature and, therefore, melt in the rectum or vaginal cavity and release the active compound.

[0745] Peptide inhibitors of the present invention may also be administered in liposomes or other lipid-based carriers. As is known in the art, liposomes are generally derived from phospholipids or other lipid substances. Liposomes are formed by mono- or multi-lamellar hydrated liquid crystals that are dispersed in an aqueous medium. Any non-toxic, physiologically acceptable and metabolizable lipid capable of forming liposomes can be used. The present compositions in liposome form can contain, in addition to a peptide inhibitor of the present invention, stabilizers, preservatives, excipients, and the like. In certain embodiments, the lipids comprise phospholipids, including the phosphatidyl cholines (lecithins) and serines, both natural and synthetic. Methods to form liposomes are known in the art.

[0746] Pharmaceutical compositions suitable for parenteral administration in a method or use described herein may comprise sterile aqueous solutions and/or suspensions of the IL:-23R inhibitors made isotonic with the blood of the recipient, generally using sodium chloride, glycerin, glucose, mannitol, sorbitol, and the like.

[0747] The present invention provides a pharmaceutical composition for oral delivery. Compositions and peptide inhibitors of the present invention may be prepared for oral administration according to any of the methods, techniques, and/or delivery vehicles described herein. Further, one having skill in the art will appreciate that the peptide inhibitors of the instant invention may be modified or integrated into a system or delivery vehicle that is not disclosed herein, yet is well known in the art and compatible for use in oral delivery of peptides.

[0748] Formulations for oral administration may comprise adjuvants (e.g. resorcinols and/or nonionic surfactants such as polyoxyethylene oleyl ether and n- ether) to artificially increase the permeability of the intestinal walls, and/or enzymatic inhibitors (e.g. pancreatic trypsin inhibitors, diisopropylfluorophosphate (DFF) or trasylol) to inhibit enzymatic degradation. In certain embodiments, the peptide inhibitor of a solid-type dosage form for oral administration can be mixed with at least one additive, such as sucrose, lactose, cellulose, mannitol, trehalose, raffinose, maltitol, dextran, starches, agar, alginates, chitins, chitosans, pectins, gum tragacanth, gum arabic, gelatin, collagen, casein, albumin, synthetic or semisynthetic polymer, or glyceride. These formulations for oral administration can also contain other type(s) of additives, e.g., inactive diluting agent, lubricant such as magnesium stearate, paraben, preserving agent such as sorbic acid, ascorbic acid, alpha-tocopherol, antioxidants such as cysteine, disintegrators, binders, thickeners, buffering agents, pH adjusting agents, sweetening agents, flavoring agents or perfuming agents.

[0749] In particular aspects, oral dosage forms or unit doses compatible for use with the peptide inhibitors of the present invention may include a mixture of peptide inhibitor and nondrug components or excipients, as well as other non-reusable materials that may be considered either as an ingredient or packaging. Oral compositions may include at least one of a liquid, a solid, and a semi-solid dosage forms. In some embodiments, an oral dosage form is provided comprising an effective amount of peptide inhibitor, wherein the dosage form comprises at least one of a pill, a tablet, a capsule, a gel, a paste, a drink, a syrup, ointment, and suppository. In some instances, an oral dosage form is provided that is designed and configured to achieve delayed release of the peptide inhibitor in the subject's small intestine and/or colon.

[0750] Tablets may contain excipients, glidants, fillers, binders and the like. Aqueous compositions are prepared in sterile form, and when intended for delivery by other than oral administration generally will be isotonic. Compositions may optionally contain excipients such as those set forth in the “Handbook of Pharmaceutical Excipients” (1986). Excipients include ascorbic acid and other antioxidants, chelating agents such as EDTA, carbohydrates such as dextran, hydroxyalkylcellulose, hydroxyalkylmethylcellulose, stearic acid and the like. The pH of the compositions ranges from, for example, about 3 to about 11. The pH of the compositions may, for example, range from about 5 to about 7 or from about 7 to about 10.

[0751] An oral pharmaceutical composition of the present invention may comprise an IL-23R inhibitor of the present invention may comprise an enteric coating that is designed to delay release of the IL-23R inhibitor in the small intestine. The invention relates to a pharmaceutical composition that comprises an IL-23R inhibitor of the present invention and a protease inhibitor, such as aprotinin, in a delayed release pharmaceutical formulation.

[0752] Pharmaceutical compositions (e.g., oral pharmaceutical compositions) may comprise an enteric coat that is soluble in gastric juice at a pH of about 5.0 or higher. Such enteric coatings may comprise a polymer having dissociable carboxylic groups, such as derivatives of cellulose, including hydroxypropylmethyl cellulose phthalate, cellulose acetate phthalate and cellulose acetate trimellitate and similar derivatives of cellulose and other carbohydrate polymers.

[0753] An oral pharmaceutical composition comprising an IL-23R inhibitor of the present invention that comprises an IL-23R inhibitor may comprise an enteric coating that is designed to protect and release the pharmaceutical composition in a controlled manner within the subject's lower gastrointestinal system, and to avoid systemic side effects. In addition to enteric coatings, the peptide inhibitors of the instant invention may be encapsulated, coated, engaged or otherwise associated within any compatible oral drug delivery system or component. For example, in some embodiments an IL-23R inhibitor of the present invention is provided in a lipid carrier system comprising at least one of polymeric hydrogels, nanoparticles, microspheres, micelles, and other lipid systems.

[0754] To overcome peptide degradation of an IL-23R inhibitor of the present invention in the small intestine, the pharmaceutical compositions may comprise a hydrogel polymer carrier system in which a peptide inhibitor of the present invention is contained, whereby the hydrogel polymer protects the IL-23R inhibitor from proteolysis in the small intestine and/or colon. The an IL-23R inhibitor may further be formulated for compatible use with a carrier system that is designed to increase the dissolution kinetics and enhance intestinal absorption of the peptide. These methods include the use of liposomes, micelles and nanoparticles to increase GI tract permeation of peptides.

[0755] Various bioresponsive systems may also be combined with one or more an IL-23R inhibitors of the present invention to provide a pharmaceutical agent for oral delivery. For example, an IL-23R inhibitor of the present invention may be used in combination with a bioresponsive system, such as hydrogels and mucoadhesive polymers with hydrogen bonding groups (e.g., PEG, poly(methacrylic) acid [PMAA], cellulose, Eudragit®, chitosan and alginate) to provide a therapeutic agent for oral administration.

[0756] In certain aspects, pharmaceutical composition and formulations may include an IL-23R inhibitor of the present invention and one or more absorption enhancers, enzyme inhibitors, or mucoso adhesive polymers. In an embodiment, the absorption enhancer may be an intestinal permeation enhancer.

[0757] IL-23R inhibitors of the present invention may be formulated in a formulation vehicle, such as, e.g., emulsions, liposomes, microsphere or nanoparticles.

[0758] The present invention provides for a method for treating a subject with an IL-23R inhibitor of the present invention having an increased half-life. In one aspect, the present invention provides a peptide inhibitor having a half-life of at least several hours to one day in vitro or in vivo (e.g., when administered to a human subject) sufficient for daily (q.d.) or twice daily (b.i.d.) dosing of a therapeutically effective amount. In certain embodiments, the IL-23R inhibitor has a half-life of three days or longer sufficient for weekly (q.w.) dosing of a therapeutically effective amount. In certain embodiments, the IL-23R inhibitor has a half-life of eight days or longer sufficient for bi-weekly (b.i.w.) or monthly dosing of a therapeutically effective amount. In certain embodiments, the IL-23R inhibitor is derivatized or modified such that is has a longer half-life as compared to the underivatized or unmodified peptide inhibitor. In certain embodiments, the IL-23R inhibitor contains one or more chemical modifications to increase serum half-life.

[0759] When used in at least one of the treatments or delivery systems described herein, a peptide inhibitor of the present invention may be employed in pure form or, where such forms exist, in pharmaceutically acceptable salt form.

[0760] The total daily usage of the IL-23R inhibitor and compositions of the present invention can be decided by the attending physician within the scope of sound medical judgment. The specific therapeutically effective dose level for any particular subject will depend upon a variety of factors including: a) the disorder being treated and the severity of the disorder; b) activity of the specific compound employed; c) the specific composition employed, the age, body weight, general health, sex and diet of the patient; d) the time of administration, route of administration, and rate of excretion of the specific peptide inhibitor employed; e) the duration of the treatment; f) drugs used in combination or coincidental with the specific peptide inhibitor employed, and like factors well known in the medical arts.

[0761] In particular embodiments, the total daily dose of a IL-23R inhibitor of the present invention to be administered to a human or other mammal host in single or divided doses may be in amounts, for example, from 0.0001 to 300 mg/kg body weight daily or 1 to 300 mg/kg body weight daily.

[0762] The compositions may conveniently be presented in unit dosage form and can be prepared by any of the methods well known in the art of pharmacy. Techniques and compositions generally are foud in Remington's Pharmaceutical Sciences (Mack Publishing Co., Easton, PA). Such methods include the step of bringing into association the active ingredient with the carrier which constitutes one or more accessory ingredients. In general the compositions are prepared by uniformly and intimately bringing into association the active ingredient with liquid carriers or finely divided solid carriers or both, and then, if necessary, shaping the product.

[0763] Compositions suitable for oral administration can be presented as discrete units such as capsules, cachets or tablets each containing a predetermined amount of the active ingredient; as a powder or granules; as a solution or a suspension in an aqueous or non-aqueous liquid; or as an oil-in-water liquid emulsion or a water-in-oil liquid emulsion. The active ingredient may also be administered as a bolus, electuary or paste. The active ingredient may also be administered as a buccal or sublingual formulation. Buccal or sublingual formulations may comprise an active ingredient in a matrix that releases the active ingredient for transport across the buccal and/or sublingual membranes. The buccal or sublingual formulation may further include a rate controlling matrix that releases the active compounds at a predetermined rate for transport across the buccal and/or sublingual membranes. The buccal or sublingual formulation may further include one or more compounds selected from the group consisting of (i) taste masking agents, (ii) enhancers, (iii) complexing agents, and mixtures thereof; and (iv) other pharmaceutically acceptable carriers and/or excipients. The enhancer may be a permeation enhancer.

[0764] A tablet is made by compression or molding, optionally with one or more accessory ingredients. Compressed tablets can be prepared by compressing in a suitable machine the active ingredient in a free-flowing form such as a powder or granules, optionally mixed with a binder, lubricant, inert diluent, preservative, surface active or dispersing agent. Molded tablets may be made by molding in a suitable machine a mixture of the powdered active ingredient moistened with an inert liquid diluent. The tablets can optionally be coated or scored and optionally are formulated so as to provide slow or controlled release of the active ingredient therefrom.

### V. Non-Invasive Detection of Intestinal Inflammation

[0765] The IL-23R inhibitors of the present invention may be used for detection, assessment and diagnosis of intestinal inflammation by microPET imaging, wherein the peptide inhibitor is labeled with a chelating group or a detectable label, as part of a non-invasive diagnostic procedure. In certain embodiments, an IL-23R inhibitor of the present invention is conjugated with a bifunctional chelator. In certain embodiments, an IL-23R inhibitor of the present invention is radiolabeled. The labeled an IL-23R inhibitor is then administered to a subject orally or rectally. In certain embodiments, the IL-23R inhibitor is included in drinking water. Following uptake of the IL-23R inhibitor, microPET imaging may be used to visualize inflammation throughout the subject's bowels and digestive track.

VI. Methods of Treatments and/or Uses

[0766] The present invention relates to methods for treating a subject afflicted with a condition or indication associated with IL-23 or IL-23R (e.g., activation of the IL-23/IL-23R signaling pathway), wherein the method comprises administering to the subject an IL-23R inhibitor disclosed herein. A In one aspect, the present invention relates to a method for treating a subject afflicted with a condition or indication characterized by inappropriate, deregulated, or increased IL-23 or IL-23R activity or signaling, comprising administering to the individual a peptide inhibitor of the present invention in an amount sufficient to inhibit (partially or fully) binding of IL-23 to an IL-23R in the subject. The inhibition of IL-23 binding to IL-23R may occur in particular organs or tissues of the subject, e.g., the stomach, small intestine, large intestine/colon, intestinal mucosa, lamina propria, Peyer's Patches, mesenteric lymph nodes, or lymphatic ducts.

[0767] The present invention relates to methods comprising providing a peptide inhibitor described herein to a subject in need thereof. The subject in need thereof may be a subject that has been diagnosed with or has been determined to be at risk of developing a disease or disorder associated with IL-23/IL-23R. The subject may be a mammal. The subject may be, in particular, a human.

[0768] The disease or disorder to be treated by treatment with an IL-23R inhibitor of the present invention may be autoimmune inflammation and related diseases and disorders, such as multiple sclerosis, asthma, rheumatoid arthritis, inflammation of the gut, inflammatory bowel diseases (TBDs), juvenile TBD, adolescent TBD, Crohn's disease, ulcerative colitis, sarcoidosis, Systemic Lupus Erythematosus, ankylosing spondylitis (axial spondyloarthritis), psoriatic arthritis, or psoriasis. In particular, the disease or disorder may be psoriasis (e.g., plaque psoriasis, guttate psoriasis, inverse psoriasis, pustular psoriasis, Palmo-Plantar Pustulosis, psoriasis vulgaris, or erythrodermic psoriasis), atopic dermatitis, acne ectopica, ulcerative colitis, Crohn's disease, Celiac disease (nontropical Sprue), enteropathy associated with seronegative arthropathies, microscopic colitis, collagenous colitis, eosinophilic gastroenteritis/esophagitis, colitis associated with radio- or chemo-therapy, colitis associated with disorders of innate immunity as in leukocyte adhesion deficiency-1, chronic granulomatous disease, glycogen storage disease type 1b, Hermansky-Pudlak syndrome, Chediak-Higashi syndrome, Wiskott-Aldrich Syndrome, pouchitis, pouchitis resulting after proctocolectomy and ileoanal anastomosis, gastrointestinal cancer, pancreatitis, insulin-dependent diabetes mellitus, mastitis, cholecystitis, cholangitis, primary biliary cirrhosis, viral-associated enteropathy, pericholangitis, chronic bronchitis, chronic sinusitis, asthma, uveitis, or graft versus host disease.

[0769] The present invention relates to a method or use of an IL-23R inhibitor for treating an inflammatory disease in a subject that includes administering to the subject a therapeutically effective amount of an IL-23R inhibitor of the present invention or pharmaceutically acceptable solvate or salt thereof, or a composition disclosed herein comprising an IL-23 inhibitor of the present invention. In some aspects, the present invention provides a method of treating an inflammatory disease in a subject that includes administering to the subject a therapeutically effective amount of an IL-23R inhibitor of the present invention or pharmaceutically acceptable solvate or salt thereof, or a composition of the present invention. Suitable inflammatory diseases for treatment with a compound or pharmaceutically acceptable salt thereof, or a composition of the present invention, may include, but are not limited to inflammatory bowel disease (IBD), Crohn's disease (CD), ulcerative colitis (UC), psoriasis (PsO), or psoriatic arthritis (PsA) and the like. The inflammatory disease to be treated may be inflammatory bowel disease (IBD), Crohn's disease, or ulcerative colitis. The inflammatory disease to be treated may be selected from psoriasis, or psoriatic arthritis. The inflammatory disease to be treated may be psoriasis The inflammatory disease to be treated may be psoriatic arthritis. The inflammatory disease to be treated may be IBD.

[0770] The present invention relates to methods for treating an inflammatory disease in a subject in need thereof, comprising administering to the subject an IL-23R inhibitor disclosed herein (e.g., a peptide inhibitor or the IL-23R of Formula (I) to Formula (VI) or any of Tables 1A-1E. The inflammatory disease may be IBD, Crohn's disease, or ulcerative colitis. In aspect, the IBD may be ulcerative colitis. In an aspect, the IBD may be Crohn's disease. In an aspect, the inflammatory disease may be psoriasis (PsO), or psoriatic arthritis (PsA).

[0771] The present invention relates to methods for treating an inflammatory disease in a subject in need thereof, comprising administering to the subject an IL-23R inhibitor of Formulae I to X) or any of Tables 1A-1E. The inflammatory disease may be IBD, Crohn's disease, or ulcerative colitis. In aspect, the IBD may be ulcerative colitis. In an aspect, the IBD may be Crohn's disease. In an aspect, the inflammatory disease may be psoriasis (PsO), or psoriatic arthritis (PsA).

[0772] The present invention relates to methods for treating an inflammatory disease in a subject in need thereof, comprising administering to the subject an IL-23R inhibitor of Formulae I to X) or any of Tables 1A-1E. The inflammatory disease may be IBD, Crohn's disease, or ulcerative colitis. In aspect, the IBD may be ulcerative colitis. In an aspect, the IBD may be Crohn's disease. In an aspect, the inflammatory disease may be psoriasis (PsO), or psoriatic arthritis (PsA).

[0773] The present invention relates to methods of inhibiting IL-23 binding to an IL-23R on a cell, comprising contacting the IL-23R with a peptide inhibitor of the receptor disclosed herein. The cell may be a mammalian cell. The method may be performed in vitro or in vivo. Inhibition of binding may be determined by a variety of routine experimental methods and assays known in the art.

[0774] The present invention relates to a method of selectively inhibiting IL-23 or IL-23R signaling (or the binding of IL-23 to IL-23R) in a subject (e.g., in a subject in need thereof), comprising providing to the subject a peptide inhibitor of the IL-23R described herein. The present invention includes and provides a method of selectively inhibiting IL-23 or IL-23R signaling (or the binding of IL-23 to IL-23R) in the GI tract of a subject (e.g., a subject in need thereof), comprising providing to the subject a peptide inhibitor of the IL-23R of the present invention by oral administration. The exposure of GI tissues (e.g., small intestine or colon) to the administered peptide inhibitor may be at least 10-fold, at least 20-fold, at least 50-fold, or at least 100-fold greater than the exposure (level) in the blood. In particular embodiments, the present invention includes a method of selectively inhibiting IL23 or IL23R signaling (or the binding of IL23 to IL23R) in the GI tract of a subject (e.g., a subject in need thereof), comprising providing to the subject a peptide inhibitor, wherein the peptide inhibitor does not block the interaction between IL-6 and IL-6R or antagonize the IL-12 signaling pathway. In a further related embodiment, the present invention includes a method of inhibiting GI inflammation and/or neutrophil infiltration to the GI, comprising providing to a subject in need thereof a peptide inhibitor of the present invention. In some embodiments, methods of the present invention comprise providing a peptide inhibitor of the present invention (i.e., a first therapeutic agent) to a subject (e.g., a subject in need thereof) in combination with a second therapeutic agent. In certain embodiments, the second therapeutic agent is provided to the subject before and/or simultaneously with and/or after the peptide inhibitor is administered to the subject. In particular embodiments, the second therapeutic agent is an anti-inflammatory agent. In certain embodiments, the second therapeutic agent is a non-steroidal anti-inflammatory drug, steroid, or immune modulating agent. In certain embodiments, the method comprises administering to the subject a third therapeutic agent. In certain embodiments, the second therapeutic agent is an antibody that binds IL-23 or IL-23R.

[0775] The present invention relates to methods of inhibiting IL-23 signaling by a cell, comprising contacting the IL-23R with a peptide inhibitor described herein. In certain embodiments, the cell is a mammalian cell. In particular embodiments, the method is performed in vitro or in vivo. In particular embodiments, the inhibition of IL-23 signaling may be determined by measuring changes in phospho-STAT3 levels in the cell.

[0776] In any of the foregoing methods, IL-23R inhibitor administration to a subject may be conducted orally, but other routes of administration are not excluded. Other routes of administration include, but are not limited to, parenteral, subcutaneous, intravenous, intramuscular, intraperitoneal, transdermal, topical, buccal or ocular routes. Dosages of a peptide inhibitor or the IL-23R described herein (e.g., a compound of Formulae (I) to (X) or any of Tables 1A-1E), or salt or solvate thereof to be administered to a subject may be determined by a person of skill in the art taking into account the the disease or condition being treated including its severity, and factors including the age weight, sex, and the like.

[0777] Exemplary dose ranges include, but are not limited to, from about 1 mg to about 1000 mg, or from about 1 mg to about 500 mg, from about 1 mg to about 100 mg, from about 10 mg to about 50 mg, from about 20 mg to about 40 mg, or from about 20 mg to about 30 mg. A dose range of a peptide inhibitor or the IL-23R described herein may be from about 600 mg to about 1000 mg. A dose range of a peptide inhibitor or the IL-23R described herein may be from about 300 mg to about 600 mg. A dose range of a peptide inhibitor or the IL-23R described herein may be from about 5 mg to about 300 mg. A dose range of a peptide inhibitor or the IL-23R described herein may be from about 25 mg to about 150 mg. A dose range of a peptide inhibitor or the IL-23R described herein may be from about 25 mg to about 100 mg. A dose range of a peptide inhibitor or the IL-23R described herein may be present in a dose range of from about 1 mg to about 100 mg. A dose range of a peptide inhibitor or the TL-23R described herein may be present in a dose range of from about 20 mg to about 40 mg. A dose range of a peptide inhibitor or the IL-23R described herein may be present in a dose range of from about 20 mg to about 30 mg.

### Examples

[0778] The following examples illustrate the invention. These examples are not intended to limit the scope of the present invention, but rather to provide guidance to the skilled artisan to prepare and use the compounds, compositions, and methods of the present invention. While particular aspects of the present invention are described, the skilled artisan will appreciate that various changes and modifications can be made without departing from the spirit and scope of the invention.

[0779] Some abbreviations useful in describing the invention are defined below in the following Table 2A and Table 2B.

TABLE 2A
Amino Acid Abbreviations

| Abbreviation | Definition |
|---|---|
| 2-Nal | L-2-naphthylalanine |
| 3Pya or 3Pal | L-3-pyridylalanine |
| 3pya | D-3-pyridylalanine |
| 4-amino-4-carboxy- tetrahydropyran or THP | [chemical structure] |
| | 4-amino-4-carboxy-tetrahydropyran |
| 4AmPhe or 4AmF | [chemical structure] |
| Achx(diF) or 4diFAchx | [chemical structure] |
| 4diFPro | [chemical structure] |
| 4DMPEF | [chemical structure] |
| 4DMPzEF | [chemical structure] |
| 4TMABYF | [chemical structure] |
| 5CF33Pya | [chemical structure] |
| 5MePyridinAla | [chemical structure] |
| 7(3NAcPh)W | [chemical structure] |
| 7CF3W | [chemical structure] |
| 7MeW or W(7-Me) or | 7-methyl-L-tryptophan |
| Trp(7-Me) | |
| NMe7MeW | [chemical structure] |
| A | L-alanine |
| Abu | 2-aminobutyric acid |
| AAMPhe or Paf(Ac) | [chemical structure] |
| ACHMF | [chemical structure] |
| ACHMF(R*,S*) | [chemical structure] |
| ACHMF(S*,S*) | [chemical structure] |
| ACHMF | [chemical structure] |
| ACHMF(S*) | [chemical structure] |
| ACHMF(R*) | [chemical structure] |
| Achx | [chemical structure] |
| Acpx or Acvc | [chemical structure] |
| AEF, Phe[4-(2-aminoethoxy)], | 4-(2-aminoethoxy)-L-phenylalanine |
| or F(4-2ae) | |
| AEF(Ac) or AcAEF | [chemical structure] |
| AEF(AcCh) | [chemical structure] |
| AEF(aPEG2a) | [chemical structure] |
| AEF(BisMEP) | [chemical structure] |
| AEF(BisMEPa) | [chemical structure] |
| AEF(BisPEG2a) | [chemical structure] |
| AEF(BisPEG2a)(RS) | [chemical structure] |
| AEF(BisPEG2a)(R*) | [chemical structure] |
| AEF(BisPEG2a)(S*) | [chemical structure] |
| AEF((Ch)cPEG3a) | [chemical structure] |
| AEF(G) | [chemical structure] |
| AEF(Me)2 or AEF(N(Me)2) | [chemical structure] |
| AEF(MEP) | [chemical structure] |
| AEF(MePrpa) | [chemical structure] |
| AEF(NHCh) | [chemical structure] |
| AEF(NHcPEG3a) or AEF(cPEG3a) | [chemical structure] |
| AEF(NMe) | [chemical structure] |
| AEF(NMe2mPEG3) | [chemical structure] |
| AEF(NMe3) | [chemical structure] |
| AEF(NMeBismPEG3) or AEF(aBismPEG3) | [chemical structure] |
| AEF(NMePEG2a) | [chemical structure] |
| AEF(NmPEG6) | [chemical structure] |
| AEF(NsCh) | [chemical structure] |
| AEF(PEG2a) | [chemical structure] |
| AEF(SPD) | [chemical structure] |
| APEG2F | [chemical structure] |
| APEG3F | [chemical structure] |
| Ahx | 6-aminohexanoic acid |
| AIB | [chemical structure] |
| aMeC | alpha-methyl L-cystine |
| aMeE | alpha-methyl L-glutamic acid |
| aMeLeu or aMeL | alpha-methyl L-leucine |
| aMeLys or aMeK | alpha-methyl L-lysine |
| APEG2ser | [chemical structure] |
| APEG2Ser | [chemical structure] |
| APEG2Ser(RS) | [chemical structure] |
| APEG2Ser(S*) | [chemical structure] |
| APEG2Ser(R*) | [chemical structure] |
| APF | [chemical structure] |
| bAla | [chemical structure] |
| Chg | [chemical structure] |
| Cit | [chemical structure] |
| Dab | L-2,4-diaminobutyric acid |
| Dab(Me)3 | [chemical structure] |
| Dab(NMeAc) | [chemical structure] |
| Dab(NMecarn) | [chemical structure] |
| Dab(NMeCarn) | [chemical structure] |
| Dab(NMeCOmPEG6) | [chemical structure] |
| Dab(NMecPEG2a) | [chemical structure] |
| Dab(NMecPEG3a) | [chemical structure] |
| Dab(NMecPEG5a) or Dab(NMecPEG5aCO)- | [chemical structure] |
| Dap | L-2,3-diaminopropionic acid |
| Dap(Ac) | [chemical structure] |
| Dap(NMeAc) | [chemical structure] |
| diFCpx | [chemical structure] |
| dFPPEG3F | [chemical structure] |
| Diazabiclyclooctane6F | [chemical structure] |
| DMMMF | [chemical structure] |
| DMPMF | [chemical structure] |
| DMTASF | [chemical structure] |
| e(c) | [chemical structure] |
| e(C) | [chemical structure] |
| E(c) | [chemical structure] |
| E(C) | [chemical structure] |
| F | L-phenylalanine |
| F(4G) | [chemical structure] |
| F(4N3) | [chemical structure] |
| F(4TzlAme2) | [chemical structure] |
| F(4TzlDMA4mPEG) | [chemical structure] |
| F(4TzlG2) | [chemical structure] |
| F(4TzlMME) | [chemical structure] |
| F(4TzlMMo1) | [chemical structure] |
| F(4TzlMMo3) | [chemical structure] |
| F(4TzlMMo4) | [chemical structure] |
| F(4TzlMMo7) | [chemical structure] |
| F(4TzlTMA1) | [chemical structure] |
| F(4TzlTMA2) | [chemical structure] |
| F(4TzlTMA3) | [chemical structure] |
| F(4TzlTMA4) | [chemical structure] |
| F(4TzlTMA5) | [chemical structure] |
| F(4TzlTMA7) | [chemical structure] |
| Fmoc-2Nal-OH | (S)-2-((((9H-fluoren-9- |
| | yl)methoxy)carbonyl)amino)-3-(naphthalen-2- |
| | yl)propanoic acid |
| Fmoc-3Pya-OH | (S)-2-((((9H-fluol)methoxy)carbonyl)amino)-3- |
| | (pyridin-3-yl)propanoic acid |
| Fmoc-7MeW-OH | (S)-2-((((9H-fluoren-9- |
| | yl)methoxy)carbonyl)amino)-3-(7-methyl-1H- |
| | indol-3-yl)propanoic acid |
| Fmoc-AEF(Boc)-OH | (S)-2-((((9H-fluoren-9- |
| | yl)methoxy)carbonyl)amino)-3-(4-(2-((tert- |
| | butoxycarbonyl)amino)ethoxy)phenyl)propanoic |
| | acid |
| Fmoc-AEF-OH | (S)-2-((((9H-fluoren-9- |
| | yl)methoxy)carbonyl)amino)-3-(4-(2- |
| | aminoethoxy)phenyl)propanoic acid |
| Fmoc-arg-OH or Fmoc-r-OH | (((9H-fluoren-9-yl)methoxy)carbonyl)-D-arginine |
| Fmoc-arg(Pbf)-OH or Fmoc- | N2-(((9H-fluoren-9-yl)methoxy)carbonyl)-Nw- |
| r(Pbf)-OH | ((2,2,4,6,7-pentamethyl-2,3-dihydrobenzofuran-5- |
| | yl)sulfonyl)-D-arginine |
| Fmoc-Asn(Trt)-OH or Fmoc- | N2-(((9H-fluoren-9-yl)methoxy)carbonyl)-N4- |
| N(Trt)-OH | trityl-L-asparagine |
| Fmoc-Asn-OH or | (((9H-fluoren-9-yl)methoxy)carbonyl)-L- |
| Fmoc-N-OH | asparagine |
| Fmoc-Dap(Dde)-OH | (S)-2-((((9H-fluoren-9- |
| | yl)methoxy)carbonyl)amino)-3-((1-(4,4-dimethyl- |
| | 2,6-dioxocyclohexylidene)ethyl)amino)propanoic |
| | acid |
| Fmoc-Dde-Lys(Fmoc)-OH | N6-(((9H-fluoren-9-yl)methoxy)carbonyl)-N2-(1- |
| | (4,4-dimethyl-2,6-dioxocyclohexylidene)ethyl)-L- |
| | lysine |
| Fmoc-gE-OtBu | (S)-4-((((9H-fluoren-9- |
| | yl)methoxy)carbonyl)amino)-5-(tert-butoxy)-5- |
| | oxopentanoic acid |
| Fmoc-gE-OAll | (S)-4-((((9H-fluoren-9- |
| | yl)methoxy)carbonyl)amino)-5-(allyloxy)-5- |
| | oxopentanoic acid |
| Fmoc-aMeGlu(tBu) or Fmoc- | (S)-2-((((9H-fluoren-9- |
| aMeE(tBu) | yl)methoxy)carbonyl)amino)-5-(tert-butoxy)-2- |
| | methyl-5-oxopentanoic acid |
| Fmoc-Glu-OH or Fmoc-E-OH | (S)-2-((((9H-fluoren-9- |
| | yl)methoxy)carbonyl)amino)-5-(tert-butoxy)-5- |
| | oxopentanoic acid |
| Fmoc-GolA(tBu)-OH | 2-((((9H-fluoren-9-yl)methoxy)carbonyl)amino)- |
| | 3-(tert-butoxy)-2-(tert-butoxymethyl)propanoic |
| | acid |
| Fmoc-Lys(Ac)-OH or Fmoc- | N2-(((9H-fluoren-9-yl)methoxy)carbonyl)-N6- |
| K(Ac)-OH | acetyl-L-lysine |
| Fmoc-Lys(Dde)-OH or Fmoc- | N2-(Fmoc)-N6-(1-(4,4-dimethyl-2,6- |
| K(Dde)-OH | dioxocyclohexylidene)ethyl)-L-lysine |
| Fmoc-Lys(NMeAc)-OH or | N2-(((9H-fluoren-9-yl)methoxy)carbonyl)-n6- |
| Fmoc-K(NMeAc)-OH | acetyl-N6-methyl-L-lysine |
| Fmoc-NMeLys(Dde)-OH or | (9H-fluoren-9-yl)methyl (R)-(1-amino-6-((1-(4,4- |
| Fmoc-NMeK(Dde)-OH | dimethyl-2,6-dioxocyclohexylidene)ethyl)amino)-1- |
| | oxohexan-2-yl)(methyl)carbamate |
| Fmoc-Pen(Trt)-OH | (R)-2-((((9H-fluoren-9- |
| | yl)methoxy)carbonyl)amino)-3-methyl-3- |
| | (tritylthio)butanoic acid |
| Fmoc-Pro-OH or | Fmoc-L-proline |
| Fmoc-P-OH | |
| Fmoc-pro-OH or | Fmoc-D-proline |
| Fmoc-p-OH | |
| Fmoc-Sar-OH or | N-(((9H-fluoren-9-yl)methoxy)carbonyl)-N- |
| Fmoc-Sarc-OH | methylglycine |
| Fmoc-THP-OH | 4-((((9H-fluoren-9- |
| | yl)methoxy)carbonyl)amino)tetrahydro-2H-pyran- |
| | 4-carboxylic acid |
| Fmoc-Thr(tBu)-OH or | N-(((9H-fluoren-9-yl)methoxy)carbonyl)-O-(tert- |
| Fmoc-T(tBu)-OH | butyl)-L-threonine |
| Gab | [chemical structure] |
| gE-OtBu | (S)-4-(amino)-5-(tert-butoxy)-5-oxopentanoic |
| | acid |
| gE | [chemical structure] |
| Glu or E | L-glutamic acid |
| GolA(tBu) | 2-(amino)-3-(tert-butoxy)-2-(tert- |
| | butoxymethyl)propanoic acid |
| GolA | [chemical structure] |
| GolB(tBu) | 1,3-di-tert-butoxypropan-2-amine |
| GolB | [chemical structure] |
| gPEG2Ser | [chemical structure] |
| GPEG3F | [chemical structure] |
| hFTMAPF | [chemical structure] |
| hk(Me)3 | [chemical structure] |
| K(4cpg) | [chemical structure] |
| K(5cpa) | [chemical structure] |
| k(5cpa) | [chemical structure] |
| K(Ac) | [chemical structure] |
| K(cPEG3a) or K(cPEG3aCO) | [chemical structure] |
| k(cPEG3a) | [chemical structure] |
| K(d) | [chemical structure] |
| K(D) | [chemical structure] |
| k(d) | [chemical structure] |
| k(D) | [chemical structure] |
| K(dPEG6Ac) | [chemical structure] |
| k(dPEG6Ac) | [chemical structure] |
| K(dPEG9Ac) | [chemical structure] |
| k(dPEG9Ac) | [chemical structure] |
| K(dPEG12Ac) | [chemical structure] |
| k(dPEG12Ac) | [chemical structure] |
| K(IPB) | [chemical structure] |
| K(DFN) | [chemical structure] |
| k(Me)3 | [chemical structure] |
| K(Me)3 | [chemical structure] |
| K(NMeAc) or K(NMeAC) | [chemical structure] |
| K(NMeCOmPEG6) | [chemical structure] |
| K(NMeCOPEG4N + Me3) or K(NMeCOPEG5a) or K(NMecPEG5a) or K(NMePEG5a) | [chemical structure] |
| K(NMePEG3a) | [chemical structure] |
| K(NmPEG6Ac) | [chemical structure] |
| K(PEG2PEG2gEC12) | [chemical structure] |
| k(PEG2PEG2gEC12) | [chemical structure] |
| k(PEG2PEG2gE(c)C12 | [chemical structure] |
| K(PEG2PEG2gEC14) | [chemical structure] |
| k(PEG2PEG2gEC14) | [chemical structure] |
| k(PEG2PEG2PEG2 PEG2gEC12) | [chemical structure] |
| K(PEG2PEG2PEG2gEC12) | [chemical structure] |
| k(PEG2PEG6gEC12) | [chemical structure] |
| L | L-leucine |
| dL | D-leucine |
| Lys or K | L-lysine |
| dK | D-lysine |
| Lys(Ac) or K(Ac) | N-ε-acetyl-L-lysine |
| Me3Pya | [chemical structure] |
| MMoEF | [chemical structure] |
| MMoPF | [chemical structure] |
| MMPEG3F | [chemical structure] |
| morfTMA4F | [chemical structure] |
| mPEG2TMA2F or mPEGTMA2F | [chemical structure] |
| mPEG2TMA4F or mPEGTMA4F | [chemical structure] |
| mPEG3TMA4F | [chemical structure] |
| MPzPEG3F | [chemical structure] |
| MTASF | [chemical structure] |
| N | L-asparagine |
| Nle | [chemical structure] |
| NMe3Pya | [chemical structure] |
| NMebAla | [chemical structure] |
| NMeDTyr | [chemical structure] |
| N(N(Me)) or N(NMe) | [chemical structure] |
| N(N(Me)2) | [chemical structure] |
| N-MeLys, NMeLys, or | N-methyl-lysine |
| NMeK | |
| NMeK(PEG2pEG2C12) | [chemical structure] |
| NMeK(PEG2pEG2C14) | [chemical structure] |
| NMeK(PEG2PEG2gEC12) | [chemical structure] |
| NMeK(PEG2PEg2gEC14) | [chemical structure] |
| NMeK(PEG2PEG2K (Peg2Peg2gEC12)2) | [chemical structure] |
| NMeK(PEG2PEG2K (PEG2PEG2 PEG2PEG2gEC12)2) | [chemical structure] |
| NMeK(PEG2 PEG2PEg2gEC12) | [chemical structure] |
| NMeK(PEG2PEG2 PEG2PEg2gEC12) | [chemical structure] |
| NMeK(PEG2PEg6gEC12) | [chemical structure] |
| NMeK (PEG2PEg6gEC14) | [chemical structure] |
| NMeK (SP6PEG2pEG2C12) | [chemical structure] |
| NMeK (SP6PEG2PEg2gEC12) | [chemical structure] |
| NPyEF | [chemical structure] |
| NPyPEG3F | [chemical structure] |
| orn | D-ornithine |
| Paf | [chemical structure] |
| Paf(Ac) | [chemical structure] |
| Pen | L-penicillamine |
| Phe(4-CONH2) or 4AmF or | (S)-2-amino-3-(4-carbamoylphenyl)propanoic acid |
| 4AmPhe | |
| Phe(4-OMe) or F(4-OMe) or | 4-methoxy-L-phenylalanine |
| F(4Ome) or 4OMeF | |
| Pip(nMe) | [chemical structure] |
| Pip(NMe2) | [chemical structure] |
| PiperazinequatF | [chemical structure] |
| Q | L-glutamine |
| Q(N(Me)2) | [chemical structure] |
| Q(NHtBu) | [chemical structure] |
| r or dR | D-arginine |
| Sar or Sarc | sarcosine or N-methylglycine |
| SP6 | [chemical structure] |
| TBAPEG3F | [chemical structure] |
| Tetrazole | [chemical structure] |
| Tetrazole(NMe) | [chemical structure] |
| Thr or T | L-threonine |
| TMA3F | [chemical structure] |
| TMA4F | [chemical structure] |
| TMA6F | [chemical structure] |
| TMA8F | [chemical structure] |
| TMAPF | [chemical structure] |
| Trx | (1R,4R)-4-(aminomethyl)cyclohexane-1- |
| | carboxylic acid |
| Tzl(Ch) | [chemical structure] |
| TzlChmPEG | [chemical structure] |
| TzlChmPEG3 | [chemical structure] |
| W | L-tryptophan |
| Y | L-tyrosine |
| Y(C9OH) | [chemical structure] |
| Y(CHF2) or Y(CF2H) | [chemical structure] |
| Y(OEOXiMECh) | [chemical structure] |
| Y(OtzlCh) | [chemical structure] |
| Y(OTzlchC16) | [chemical structure] |
| Y(OTzlChC8) | [chemical structure] |
| Y(OTzlChmPEG) | [chemical structure] |
| Y(OTzlChmPEG3) | [chemical structure] |
| Y(OTzlPEG3a) | [chemical structure] |
| Y(OTzlPEG4a) | [chemical structure] |
| Y(OTzlTMA4) | [chemical structure] |
| Y(OZOXIMECh) | [chemical structure] |
| YC8CO(NHPEG3a) | [chemical structure] |
| YC8COPip | [chemical structure] |
| Y(OTzlC1aC8) | [chemical structure] |

TABLE 2B
Abbreviations for Substituents, Reagents, and Solvents

| Abbreviation | Definition |
|---|---|
| Ac | acetyl |
| can | acetonitrile |
| Boc | tert-butoxy-carbonyl |
| Boc-mXOH | 10-(3-(tert-butoxycarbonyl)phenoxy)decanoic acid |
| Boc-pXOH | 10-(4-(tert-butoxycarbonyl)phenoxy)decanoic acid |
| tBu | tert-butyl |
| CONH2 or | carboxamide |
| CONH₂ | |
| COOH | carboxylic acid |
| DCM | dichloromethane |
| Dde | N-(1-(4,4-dimethyl-2,6-dioxocyclohexylidene)ethyl |
| DIC | N,N′-diisopropylcarbodiimide |
| DIPEA | diisopropylethylamine |
| DMAP | N,N-dimethylaminopyridine |
| DMF | N,N-dimethylformamide |
| DODT | 3,6-dioxa-1,8-octanedithiol |
| Et₂O | diethylether |
| FMOC or | ((9H-fluoren-9-yl)methoxy)carbonyl |
| Fmoc | |
| HOAT or | 1-hydroxy-7-azabenzotriazole |
| HOAt | |
| HPLC | high performance liquid chromatography |
| LCMS | liquid chromatography mass spectrometry |
| MeOH | methanol |
| Me | methyl |
| MBHA | 4-methylbenzhydrylamine |
| MPA | mobile phase A |
| MPB | mobile phase B |
| MS | mass spectrometry |
| MTBE | methyl tert-butyl ether |
| MW | microwave |
| NMP | N-methylpyrrolidone |
| Oxyma | ethyl cyano hydroxyiminoacetate |
| Pbf | 2,2,4,6,7-pentamethyldihydrobenzofuran-5-sulfonyl |
| RP-HPLC | reverse phase high performance liquid chromatography |
| TFA | trifluoroacetic acid |
| TIPS | triisopropylsilane |
| Trt | triphenylmethyl |
| UPLC-MS | ultra high performance liquid chromatography - |
| | mass spectrometry |

TABLE 2C
Abbreviations for Substituents

| Abbreviation | Structure |
|---|---|
| 4cpgCO | [chemical structure] |
| 5cpaCO | —CO(CH₂)₅N(CH₃)₃⁺ |
| AcdPEG6CO | —CO(CH₂CH₂O)₆CH₂CH₂NHC(O)CH₃ |
| AcdPEG9CO | —CO(CH₂CH₂O)₉CH₂CH₂NHC(O)CH₃ |
| AcdPEG12CO | —CO(CH₂CH₂O)₁₂CH₂CH₂NHC(O)CH₃ |
| C12gEPEG2PEG2CO | [chemical structure] |
| C14gEPEG2PEG2CO | [chemical structure] |
| CF3CO, or F3CO | [chemical structure] |
| CF3propylamide | [chemical structure] |
| CO(DiFPip) | [chemical structure] |
| CO(mPEG8) | [chemical structure] |
| CONMe2 or CON(Me)2 | [chemical structure] |
| CON(MePEG2) | [chemical structure] |
| CONH(mPEG2) or CON(mPEG2) | [chemical structure] |
| CON(NMePip) | [chemical structure] |
| CONH(PEG5a) | [chemical structure] |
| CONHPEG3a or CONH(PEG3a) | [chemical structure] |
| CO(Morph) | [chemical structure] |
| CO(OAZBO) | [chemical structure] |
| CO(TFMOHPip) | [chemical structure] |
| cPEG3AmCO | [chemical structure] |
| cPEG2gCO | [chemical structure] |
| cPEG3aCO | [chemical structure] |
| cPEG3gCO | [chemical structure] |
| cPEG5aCO | [chemical structure] |
| DFNCO | [chemical structure] |
| DFNPEG2PEG2CO | [chemical structure] |
| EtCO | [chemical structure] |
| (d)gEPEG2PEG2CO | [chemical structure] |
| IPBCO | [chemical structure] |
| IPBPEG2PEG2CO | [chemical structure] |
| MeCO | [chemical structure] |
| mPEG3CO | —C(O)CH₂O(CH₂CH₂O)₂CH₃ |
| mPEG6CO | —C(O)(CH₂CH₂O)₆CH₃ |

### Methods of Making the Cyclic Peptides of the Present Invention

[0780] The cyclic peptides of the present invention can be made by Solid-Phase Peptide Synthesis (SPPS) using Fmoc/t-Bu chemistry and purified according to methods known in the art, e.g. according to the methods in E. Atherton and R.C. Sheppard, Solid Phase Peptide Synthesis: a Practical Approach, IRL Press (Oxford, England (1989)); or Amblard et al., Methods and Protocols of Modern Solid Phase Peptide Synthesis, Molecular Biotechnology, 2006, Volume 33, 239-254. Amino acid protecting groups that can be used in the synthesis of the BMPR2 cyclic peptides are summarized in Table A; or Isidro-Llobet et al., Amino Acid-Protecting Groups, Chem. Rev. 2009, 109, 2455-2504, which also describes examples of orthogonal protection schemes that can be used to conjugate, e.g. a natural polymer or unnatural polymer or combination thereof, to a specific site.

[0781] In general, the natural polymer or unnatural polymer or combination thereof (e.g, a hydrophilic or water-soluble polymer) can be conjugated to the first or second BMPR2 cyclic peptides by means of N-hydroxy succinimide (NHS)—, click-, or maleimide-based chemistry or other chemistry, as is known in the art. Canalle et al., Polypeptide-polymer bioconjugates, Chem. Soc. Rev., 2010, 39, 329-353; and Gauthier et al., Peptide/protein-polymer conjugates: synthetic strategies and design concepts, Chem. Commun., 2008, 2591-2611, provide overviews of some approaches to constructing peptide-polymer bioconjugates.

[0782] Further details on how the BMPR2 cyclic peptide conjugates can be made are provided in the following examples section below.

### General Peptide Synthetic Procedure 1

[0783] TL-23R inhibitor compounds described herein were synthesized from amino acids monomers using Merrifield solid phase synthesis techniques on Protein Technology's Symphony multiple channel synthesizer. The peptides were assembled using HBTU (0-Benzotriazole-N,N,N′,N′-tetramethyl-uronium-hexafluoro-phosphate), Diisopropylethylamine(DIEA) coupling conditions. For some amino acid couplings PyAOP(7-Azabenzotriazol-1-yloxy)tripyrrolidinophosponium hexafluorophosphate) and DIEA conditions were used. Rink Amide MBHA resin (100-200 mesh, 0.57 mTrmol/g) was used for peptide with C-terminal amides and pre-loaded Wang Resin with N-cl-Fmoc protected amino acid was used for peptide with C-terminal acids. The coupling reagents (HBTU and DIEA premixed) were prepared at 100 mmol concentration. Similarly, amino acids solutions were prepared at 100 mmol concentration. Peptide inhibitors of the present invention were identified based on medical chemistry optimization and/or phage display and screened to identify those having superior binding and/or inhibitory properties.

### Preparation of Certain Modified Amino Acids

### Synthesis of Protected 7-(3-Nacetyl-phenyl)-tryptoPhan (7(3NAcPh)W) (S)-2-((((9H-fluoren-9-yl)methoxy)carbonyl)amino)-3-(7-(3-acetamidophenyl)-1H-indol-3-yl)propanoic acid

[chemical structure]

[0784] To a solution of 1 (30.0 g, 153 mmol), compound 2 (41.1 g, 230 mmol) and K3PO4 (97.4 g, 459 mmol) in H₂O/ethanol (500 mL) and, Pd(dppf)C12 (1.12 g, 1.53 mmol) was added under an N₂ atmosphere. The mixture was stirred at 80° C. for 16 h. The mixture was filtered. The mixture was concentrated, then extracted with ethyl acetate (500 mL×2), dried with anhydrous Na₂SO₄. The organic layer was concentrated and purified by FCC (eluent: petroleum ether/ethyl acetate=1:0 to 55:45) to give 3 (25.0 g, yield: 62.5%) as yellow oil MS (ESI): mass calculated for C₁₆H₁₄N₂O, 250.295, m/z found 251.0 [M+].

[0785] To a 1 L round-bottomed flask containing a solution of 3 (12.0 g, 47.9 mmol) in DMF (300 mL) bromine (Br₂, 2.422 mL, 47.0 mmol) was slowly added. The mixture was stirred at 25° C. for 16 hours. The solution was added to aqueous sodium sulfite (500 mL), the mixture was stirred at 25° C. for 2 hours. The mixture was filtered, the filter cake was mixed with H₂O (400 mL) and stirred at 25° C. for 1 h. The mixture was filtered, the solid was collected to give 4 as a crude product, which was purified by preparative high-performance liquid chromatography (Column: Phenomenex C18 250×50 mm×10 um, Condition: water (FA)-CAN (20%- 60%)). The mixture was concentrated, extracted with CH₂Cl₂ (1 L×2), washed with brine, dried with anhydrous Na₂SO₄. The organic layers was filtered and concentrated to give 4 (9.70 g, yield: 60.8%) as a pale white. MS (ESI): mass calculated for C₁₆H₁₃BrN₂O, 329.191, m/z found 328.8 [M].

[0786] A 250 mL three neck round-bottomed flask was charged with activated Zn powder (5.84 g, 89.3 mmol), DMF (120 mL) and I₂ (382 mg, 1.50 mmol) was added under an N₂ atmosphere at room temperature. After stirring for 20 min, a solution of 5 (13.6 g, 30.1 mmol) in DMF (30 mL) was added to the mixture. The reaction mixture was stirred for 30 min at room temperature, after which 4 (9.70 g, 29.5 mmol), tris(dibenzylideneacetone)-palladium (826 mg, 0.902 mmol), 2-dicyclohexylphosphino-2′,6′-dimethoxybiphenyl (617 mg, 1.50 mmol) were added under an N₂ atmosphere. The reaction mixture was stirred at 50° C. for 12 hours, after which solvent was removed under reduced pressure to give crude product 6. The crude product was extracted with ethyl acetate (1500 mL). The extract was washed with H₂O (500 mL×2), followed by brine (500 mL), after which it was dried over anhydrous Na₂SO₄, filtered, and concentrated to dryness in vacuo to give crude intermediate 6, which was purified by silica gel chromatography (0-100% ethyl acetate/petroleum ether (EtOAc/PE)) to afford 6 (11.0 g, yield: 63.8%) as a brown-yellow oil. MS (ESI): mass calculated for C₃₅H₃₁N₃O₅, 573.638, m/z found 574.1 [M+1]

[0787] Intermediate 6 (11.0 g, 19.2 mmol), a stir bar, Me₃SnOH (3.64 g, 20.1 mmol) and DCE (150 mL) were added to a 250 mL round-bottomed flask and stirred at 50° C. for 12 hours. To the reaction mixture 2 N HCl was added to adjust the to pH to 6 A second reaction starting from intermediate 6 was conducted and the products were combined for further workup. The combined reaction mixture was concentrated under reduced pressure to give the crude, which was purified by preparative HPLC using a Xtimate C18 150×40 mm×Sum (eluent: 38% to 68% (v/v) CH₃CN and H₂O with 0.05% HCl) to afford product 7. The product was suspended in water (100 mL), the mixture frozen using dry ice/ethanol, and then lyophilized to dryness to afford 7 (7(3NAcPh)W, 11.8 g, yield: 66.8%) as a white solid. MS (ESI): mass calculated For C₃₄H₂₉N₃O₅, 559.611, m/z found 560.0 [M+1]. 1H NMR DMSO-d₆ (400-MHz) δ 10.73 (s, 1H)—10.10 (s, 1H), 7.52-−8.02 (m, 7H), 6.96-7.52 (m, 9H), 4.03-4.4- (m, 3H), 3.25 (d, J=13.2 Hz, 2H), 3.01-3.15 (m, 1H), 2.08 (s, 3H).

### Synthesis of Protected 5-methyl-pyridyl-alanine (5MePyridinAla)

### (S)-2-((((9H-fluoren-9-yl)methoxy)carbonyl)amino)-3-(5-methylpyridin-3-yl)propanoic acid

[chemical structure]

[0788] Activated Zn powder (8.18 g, 125 mmol), DMF (150 mL) and I₂ (0.534 g, 2.11 mmol) were stirred under an N₂ atmosphere at room temperature for 20 min., after which (R)-methyl 2-((((9H-fluoren-9-yl)methoxy)carbonyl)amino)-3-iodopropanoate (19.0 g, 42.1 mmol) in DMF (25 mL) was added. The reaction mixture was stirred for 30 min at room temperature, after which a mixture of 1 (7.97 g, 46.3 mmol), tris(dibenzylideneacetone)-palladium (1.16 g, 1.26 mmol) and 2-dicyclohexylphosphino-2′,6′-dimethoxybiphenyl (0.864 g, 2.11 mmol) in DMF (25 mL) was added under an N₂ atmosphere. The resulting reaction mixture was stirred at 50° C. for 12 h. The solvent was removed under reduced pressure to give the crude, which was purified by FCC (eluent: petroleum ether: ethyl acetate=1: 0 to 0: 1 and ethyl acetate: methanol=1: 0 to 2: 1) to afford the product 2 (10.00 g, 57.0% yield) as a pale yellow liquid. MS (ESI): mass calculated for C₂₅H₂₄N₂O₄, 416.469, m/z found 417.1 [M+H]⁺.

[0789] To a mixture of 2 (9.50 g, 22.8 mmol) in THE (100 mL) was added LiOH·H₂O (1.91 g, 45.6 mmol) in H₂O (10 mL). The mixture was stirred for 1 h at 0° C. TLC showed most SM were consumed. To the reaction mixture was added HCl (1 N) dropwise at ice bath to pH=5. The reaction mixture was concentrated under reduced pressure, then poured into water (200 mL) the mixture was extracted with THE (200 mL×3). The organic layers were combined, washed with brine (100 mL), dried over anhydrous Na₂SO₄. After filtering the organic layers were concentrated under reduced pressure to afford crude product 3, which was purified by FCC (eluent: ethyl acetate: methanol=1:0 to 2:1) to obtain 3 (5MePyridinAla, 6.716 g, yield: 72.3%) as a white powder. MS (ESI): mass calculated For C₂₄H₂₂N₂O₄, 402.442, m/z found 403.1 [M+H]⁺. ¹H NMR DMSO-d₆ (Bruker_400 MHz): δ 8.18 (s, 2H), 7.88 (d, J=7.6 Hz, 2H), 7.63 (d, J=7.2 Hz, 2H), 7.45-7.26 (m, 5H), 6.81 (s, 1H), 4.33-4.21 (m, 1H), 4.20-4.09 (m, 2H), 3.95 (s, 1H), 3.06-3.05 (m, 1H), 2.92-2.89 (m, 1H), 2.18 (s, 3H).

### EXAMPLE 6. Synthesis of Protected AEF(G)

### (S)-2-((((9H-fluoren-9-yl)methoxy)carbonyl)amino)-3-(4-(2-(3-((2,2,4,6,7-pentamethyl-2,3-dihydrobenzofuran-5-yl)sulfonyl)guanidino)ethoxy)phenyl)propanoic acid

[chemical structure]

[chemical structure]

[0790] Starting material 1 (9.9 g, 62.2 mmol), a stir bar, Et₃N (14 mL, 101 mmol), and dichloromethane (DCM, 250 mL) were added to a 500 mL round-bottomed flask. The resulting mixture was treated with 2 (10 g, 34.6 mmol) in portions under ice-water bath. Then the reaction mixture was stirred at 25° C. for 12 hours. The reaction mixture was diluted with H₂O (800 mL), extracted with DCM (400 mL×2). The organic phase extracts were combined, washed with brine (800 mL), and concentrated to give the crude intermediate 3 as a yellow solid. The crude intermediate was triturated with ethyl acetate (50 mL) and the suspension isolated via filtration. The filter cake was washed with ethyl acetate (20 mL×3) before drying under reduced pressure to give the 3 (7.12 g, 49%) as a white solid. MS (ESI): mass calculated for C₁₉H₂₉N₃O₅S₆, 411.5, m/z found 412.1 [M+H]⁺.

[0791] Starting material 4 (50.0 g, 148 mmol), a stir bar, DMF (300 mL), and K₂CO₃(102 g, 739 mmol) were added to a nitrogen-purged 1000 mL round-bottomed flask. The flask was subsequently evacuated and refilled with nitrogen (×3), after which 1,2-dibromoethane (154 mL, 1.78 mol) was added, and the resulting mixture was stirred at 80° C. for 16 h under a N₂ atmosphere. The reaction mixture was filtered and concentrated to dryness under reduced pressure to give the crude product, which was subjected to silica gel chromatography (eluent: EtOAc: pet ether =0-60%) to give the 5 (64 g, 96%) as a light yellow oil. MS (ESI): mass calculated for C₂₀H₃₀BrNO₅, 444.36, m/z found 466.1 [M+Na]⁺.

[0792] Intermediate 5 (6.1 g, 13.7 mmol), 3 (6.2 g, 15.1 mmol), K₂CO₃ (7.6 g, 55.0 mmol), a stir bar, and CH₃CN (100 mL) were charged into a 250 mL round-bottomed flask. The reaction mixture was stirred at 80° C. for 16 h under a N₂ atmosphere. The reaction mixture was cooled to room temperature, diluted with H₂O (200 mL), extracted with ethyl acetate (100 mL×2). The organic phases were combined and washed with brine (300 mL) and concentrated to give the crude intermediate 6. The crude intermediate was purified by flash column chromatography (FCC, eluent: ethyl acetate/petroleum ether=0:1 to 2:1) to give the 6 (6.62 g, 44.2%) as a white solid. MS (ESI): mass calculated for C₃₉H₅₈N₄O₁₀S, 774.9, m/z found 775.5 [M+H]⁺

[0793] Intermediate 6 (6.6 g, 8.52 mmol), HCl/1,4-dioxane (90 mL, 4M), a stir bar, and 1,4-dixoane (30 mL) were charged into a 250 mL round bottomed flask. The resulting mixture was stirred at 25° C. for 12 hr. The solvent was removed under reduced pressure to give intermediate 7 (7.8 g, crude product) as a colourless oil, which was directly used to next step. MS (ESI): mass calculated for C₂₅H₃₄N₄O₆S, 518.6, m/z found 519.2 [M+H]⁺

[0794] Intermediate 7 (7.80 g, 15.0 mmol), a stir bar, Na₂CO₃ (3.19 g, 30.1 mmol), Fmoc-OSu (5.58 g, 16.5 mmol), 1, 4-dioxane (50 mL), and H₂O (50 mL) were added into a 250 mL round-bottomed flask at 25° C. The reaction mixture was stirred at 25° C. for 16 hours, after which it was adjusted to pH=5-6 with HCl (2M) and the resulting reaction mixture was extracted with EtOAc (150 mL×3). The organic phases from the extraction were combined and washed with brine (200 mL) and concentrated to give the crude intermediate 7. The crude intermediate was purified by preparative HPLC with a Column: Phenomenex C18 150×40 mm×Sum, (eluent: 42% to 72% (v/v) CH₃CN and H₂O with 0.1% HCl) to afford pure product. The product was suspended in water (100 mL), the mixture frozen using dry ice/ethanol, and then lyophilized to dryness to afford desired product 8 AEF(G), 4 g, 36%) as a white solid. MS (ESI): mass calculated for C₄₀H₄₄N₄O₈S, 740.9, m/z found 741.3 [M+H]⁺. ¹H NMR (400 MHz, DMSO-d₆): 7.87 (d, J=7.2 Hz, 2H), 7.71-7.62 (m, 2H), 7.39 (td, J=4.0, 7.2 Hz, 2H), 7.29 (td, J=7.6, 12.0 Hz, 2H), 7.14 (br d, J=8.0 Hz, 2H), 6.99-6.85 (m, 1H), 6.77 (br d, J=8.4 Hz, 2H), 6.59-6.50 (m, 1H), 4.21-4.06 (m, 4H), 3.88 (br s, 2H), 3.42-3.36 (m, 4H), 2.99 (br dd, J=4.4, 14.0 Hz, 1H), 2.92 (s, 2H), 2.78 (br dd, J=10.8, 13.6 Hz, 1H), 2.47 (br s, 3H), 2.41 (s, 3H), 1.97 (s, 3H), 1.38 (s, 6H).

### Assembly

[0795] The peptides were assembled using standard Symphony protocols. The peptide sequences were assembled as follows: Resin (250 mg, 0.14 mmol) in each reaction vial was washed twice with 4 ml of DMF followed by treatment with 2.5 ml of 20% 4-methyl piperidine (Fmoc de-protection) for 10 min. The resin was then filtered and washed two times with DMF (4 ml) and re-treated with N-methyl piperidine for additional 30 minute. The resin was again washed three times with DMF (4 ml) followed by addition 2.5 ml of amino acid and 2.5 ml of HBTU-DIEA mixture. After 45 min of frequent agitations, the resin was filtered and washed three timed with DMF (4 ml each). For a typical peptide of the present invention, double couplings were performed. After completing the coupling reaction, the resin was washed three times with DMF (4 ml each) before proceeding to the next amino acid coupling.

Ring Closing Metathesis to form Olefins

[0796] An an example of ring closing metathesis a the resin (100 mol) was washed with 2 ml of DCM (3×1 min) and then with 2 ml of DCE (3×1 min) before being treated with a solution of 2 ml of a 6 mM solution of Grubbs' first-generation catalyst in DCE (4.94 mg ml-1; 20 mol % with regard to the resin substitution). The solution was refluxed overnight (12 h) under nitrogen before being drained. The resin was washed three times with DMF (4 ml each); DCM (4 ml) before being dried and cleaved.

### Cleavage

[0797] Following completion of the peptide assembly, the peptide was cleaved from the resin by treatment with cleavage reagent, such as reagent K (82.5% trigluoroacetic acid, 5% water, 5% thioanisole, 5% phenol, 2.5% 1,2-ethanedithiol). The cleavage reagent was able to successfully cleave the peptide from the resin, as well as all remaining side chain protecting groups.

[0798] The cleaved peptides were precipitated in cold diethyl ether followed by two washings with ethyl ether. The filtrate was poured off and a second aliquot of cold ether was added, and the procedure repeated. The crude peptide was dissolved in a solution of acetonitrile:water (7:3 with 1% TFA) and filtered. The quality of linear peptide was then verified using electrospray ionization mass spectrometry (ESI-MS) (Micromass/Waters ZQ) before being purified.

### Disulfide Bond Formation Via Oxidation

[0799] The peptide containing the free thiol (for example diPen) was assembled on a Rink Amide-MBHA resin following general Fmoc-SPPS procedure. The peptide was cleaved from the resin by treatment with cleavage reagent 90% trifluoroacetic acid, 5% water, 2.5% 1,2-ethanedithiol, 2.5% tri-isopropylsilane). The cleaved peptides were precipitated in cold diethyl ether followed by two washings with ethyl ether. The filtrate was poured off and a second aliquot of cold ether was added, and the procedure repeated. The crude peptide was dissolved in a solution of acetonitrile:water (7:3 with 1% TFA) and filtered giving the wanted unoxidized peptide crude peptide.

[0800] The crude, cleaved peptide was dissolved in 20 ml of water: acetonitrile. Saturated Iodine in acetic acid was then added drop wise with stirring until yellow color persisted. The solution was stirred for 15 minutes, and the reaction was monitored with analytic HPLC and LCMS. When the reaction was completed, solid ascorbic acid was added until the solution became clear. The solvent mixture was then purified by first being diluted with water and then loaded onto a reverse phase HPLC machine (Luna C18 support, 10u, 100A, Mobile phase A: water containing 0.1% TFA, mobile phase B: Acetonitrile (ACN) containing 0.1% TFA, gradient began with 5% B, and changed to 50% B over 60 minutes at a flow rate of 15 ml/min). Fractions containing pure product were then freeze-dried on a lyophilyzer.

### Thioether Bond Formation

[0801] The peptide containing the free thiol was assembled on a Rink Amide-MBHA resin following general Fmoc-SPPS procedure. Chlorination was carried out by treating the resin with PPh₃ (10 equiv.) and C₁₃CCN (10 equiv.) in DCM for 2 h. The peptide was cleaved from the resin by treatment with cleavage reagent 90% trifluoroacetic acid, 5% water, 2.5% 1,2-ethanedithiol, 2.5% tri-isopropylsilane). The cleaved peptides were precipitated in cold diethyl ether followed by two washings with ethyl ether. The filtrate was poured off and a second aliquot of cold ether was added, and the procedure repeated. The crude peptide was dissolved in a solution of acetonitrile:water (7:3 with 1% TFA) and filtered giving the wanted uncyclized crude peptide

### Purification

[0802] Analytical reverse-phase, high performance liquid chromatography (HPLC) was performed on a Gemini C18 column (4.6 mm×250 mm) (Phenomenex). Semi-Preparative reverse phase HPLC was performed on a Gemini 10 m C18 column (22 mm×250 mm) (Phenomenex) or Jupiter 10 m, 300 angstrom (A) C18 column (21.2 mm×250 mm) (Phenomenex). Separations were achieved using linear gradients of buffer B in A (Mobile phase A: water containing 0.15% TFA, mobile phase B: Acetonitrile (ACN) containing 0.1% TFA), at a flow rate of 1 mL/min (analytical) and 15 mL/min (preparative). Separations were achieved using linear gradients of buffer B in A (Mobile phase A: water containing 0.15% TFA, mobile phase B: Acetonitrile (ACN) containing 0.1% TFA), at a flow rate of 1 mL/min (analytical) and 15 mL/min (preparative).

### General Procedure 1A:

[0803] TL-23R inhibitor compounds described herein were synthesized from amino acids monomers using standard Fmoc solid phase synthesis techniques on a CEM Liberty Blu™ microwave peptide synthesizer. The peptides were assembled using Oxyma/DIC (ethyl cyanohydroxyiminoacetate/diisopropyl-carbodiimide) with microwave heating. Rink Amide-MB- A resin (100-200 mesh, 0.66 mmol,/g) was used for peptides with C-terminal amides and pre-loaded Wang Resin with N-α-Fmoc protected amino acid was used for peptide with C-terminal acids. Oxyma was prepared as a 1M solution in DMF with 0.1 M DIEA. DIC was prepared as 0.5M solution in DMF. The Amino acids were prepared at 200 mM. Peptide inhibitors of the present invention were identified based on medicinal chemistry optimization and/or phage display and screened to identify those having superior binding and/or inhibitory properties.

### Assembly

[0804] The peptides were made using standard CEM Liberty Blue™ protocols. The peptide sequences were assembled as follows: Resin (400 mg, 0.25 mmol) was suspended in 10 ml of 50/50 DMF/DCM. The resin was then transferred to the reaction vessel in the microwave cavity. The peptide was assembled using repeated Fmoc deprotection and Oxyma/DIC coupling cycles. For deprotection, 20% 4-methylpiperidine in DMF was added to the reaction vessel and heated to 90° C. for 65 seconds. The deprotection solution was drained and the resin washed three times with DMF. For most amino acids, 5 equivalents of amino acid, Oxyma and DIC were then added to the reaction vessel and microwave irradiation rapidly heated the mixing reaction to 90° C. for 4 min. For Arginine and Histidine residues, milder conditions using respective temperatures of 75 and 50° C. for 10 min were used to prevent racemization. Rare and expensive amino acids were often coupled manually overnight at room temperature using only 1.5-2 eq of reagents. Difficult couplings were often double coupled 2×4 min at 90° C. After coupling the resin was washed with DMF and the whole cycle was repeated until the desired peptide assembly was completed.

### Cleavage

[0805] Following completion of the peptide assembly, the peptide was then cleaved from the resin by treatment with a standard cleavage cocktail of 91:5:2:2 TFA/H₂O/TIPS/DODT for 2 hrs. If more than one Arg(pbf) residue was present the cleavage was allowed to go for an additional hour.

[0806] The cleaved peptides were precipitated in cold diethyl ether. The filtrate was decanted off and a second aliquot of cold ether was added, and the procedure was repeated. The quality of linear peptide was then verified using electrospray ionization mass spectrometry (ESI-MS) (Waters® Micromass® ZQ™) before being purified.

[0807] Disulfide Bond Formation via Oxidation

[0808] The peptide containing the free thiol (for example diPen) was assembled on a Rink Amide-MBHA resin following general Fmoc solid phase synthesis, cleavage and isolation as described above.

[0809] The crude cleaved peptide comprising two thiol containing amino acids was dissolved −2 mg/ml in 50/50 acetonitrile/water. Saturated iodine in acetic acid was then added dropwise with stirring until yellow color persisted. The solution was stirred for a few minutes, and the reaction was monitored with analytic HPLC and LCMS. When the reaction was completed, solid ascorbic acid was added until the solution became clear. The solvent mixture was then purified by first being diluted with water and then loaded onto a reverse phase HPLC Column (Luna® C18 support, 10u, 100A, Mobile phase A: water containing 0.1% TFA, mobile phase B: acetonitrile (ACN) containing 0.1% TFA, gradient began with 15% B, and changed to 50% B over 60 minutes at a flow rate of 15 ml/min). Fractions containing pure product were then freeze-dried on a lyophilizer.

### Purification

[0810] Analytical reverse-phase, high performance liquid chromatography (HPLC) was performed on a Gemini® C18 column (4.6 mm×250 mm) (Phenomenex). Semi-Preparative reverse phase HPLC was performed on a Gemini® 10 m C18 column (22 mm×250 mm) (Phenomenex) or Jupiter® 10 m, 300 angstrom (A) C18 column (21.2 mm×250 mm) (Phenomenex). Separations were achieved using linear gradients of buffer B in A (Mobile phase A: water containing 0.15% TFA, mobile phase B: Acetonitrile (ACN) containing 0.1% TFA), at a flow rate of 1 mL/min (analytical) and 20 mL/min (preparative).

### Alternate Procedure for Solid-Phase Synthesis of Peptides

[0811] Peptide were chemically synthesized using optimized 9-fluorenylmethoxy carbonyl (Fmoc) solid phase peptide synthesis protocols. For C-terminal amides, Rink-amide MBHA resin, Methyl Indole AM resin or CTC resin then couple amine after cleavage was used. The side chain protecting groups were as follows: Thr, Glu: 0-tButyl; Asn, Pen: Trityl; AEF, AEF(NMe): Boc; D-Arg: Pbf For coupling, a two to five-fold excess of a solution containing Fmoc amino acid, HATU and DIEA (1:0.95:2) in DMF was added to swelled resin for 1 to 5 hours. Double coupling is employed when coupling 2Nal or other sterically hindered amino acids. Fmoc protecting group removal was achieved by treatment with a DMF, piperidine (4:1) solution for 30 min. The cycles are repeated until the full-length peptide is obtained. The quaternary ammonium amino acids (eg: APEG3F) should be transferred to HCl salt if the salt form was formic acid.

### Procedure for Cleavage of Peptides Off Resin

[0812] Side chain deprotection and cleavage of the peptide analogues of the invention was achieved by stirring dry resin in a solution containing trifluoroacetic acid, water, DTT and tri-isopropylsilane (90:2.5:5:2.5) for 3 hours. Filtered and the combined filtrate was precipitated with cold methyl tertbutyl ether (MTBE). The mixture was centrifuged (3000 rpm, 3 min) and decanted. The pellet was washed with MTBE and centrifuged. Lyophilized the residue to give the linear peptide.

### Procedure for Cyclization

[0813] For cyclization, the iodine solution in MeOH (0.1M) was added to peptide solution (20% MeCN/H2O (1mmol/L)) drop-wise until solution remains yellow. After ˜2h LCMS showed the reaction was complete. Excess iodine was quenched by the addition of 1M Na2S2O3 in water (turned colorless instantly).

### Procedure for Purification of Peptides

[0814] Purification of the peptides was achieved using reverse-phase high performance liquid chromatography (RP-HPLC). Purification of the cyclized peptides was achieved using preparative RP-HPLC with a C18 column with a flow rate of 20 mL/min. Separation was achieved using gradients of buffer B in A (Buffer A: 0.075% TFA in water; Buffer B: ACN). (Note 1). Analysis was performed using a C18 column with a flow rate of 1 mL/min (Note 2).

[0815] One of skill in the art will appreciate that standard methods of peptide synthesis may be used to generate the compounds of the invention.

[0816] Prep. HPLC Method A: Description: Mobile Phase: 0.075% TFA in water (solvent A) and acetonitrile (solvent B) Column: Luna 100*25 mm, C18, 10 um, 100 Å+Gemini® 150*30 mm, C18, 5 um, 110A column; Flow Rate: 20 mL/min; Wavelength: UV 220 nm&254 nm; Oven Tem. Room temperature

[0817] Prep. HPLC Method B: Description: Mobile Phase: 0.075% TFA in water (solvent A) and acetonitrile (solvent B) Column: Welch Ultimate XB—C18, 250*50 mm, 7 um, 120 Å+Welch Xtimate C18, 250*50 mm, 10 um, 120A column; Flow Rate: 80 mL/min; Wavelength: UV 220 nm&254 nm; Oven Tem. Room temperature

[0818] Prep. HPLC Method C: Description: Mobile Phase: 0.075% TFA in water (solvent A) and acetonitrile (solvent B) Column: Luna C18, 250*100 mm, 10 um, 100A column; Flow Rate: 120 mL/min; Wavelength: UV 220 nm&254 nm; Oven Tem. Room temperature

[0819] Prep. HPLC Method D: Description: Mobile Phase: 0.5% AcOH in water (solvent A) and acetonitrile (solvent B) Column: Luna C18, 250*100 mm, 10 um, 100A column; Flow Rate: 120 mL/min; Wavelength: UV 220 nm&254 nm; Oven Tem. Room temperature

[0820] Prep. HPLC Method E: Description: Mobile Phase: 0.075% TFA in water (solvent A) and acetonitrile (solvent B) Column: Welch Ultimate® XB—C18, 250*100 mm, 10 um, 120A column; Flow Rate: 250 mL/min; Wavelength: UV 220 nm&254 nm; Oven Tem.

### Room Temperature

[0821] Prep. HPLC Method F: Description: Mobile Phase: 0.5% AcOH in water (solvent A) and acetonitrile (solvent B) Column: Welch Ultimate® XB—C18, 250*50 mm, 10 um, 120 Å+Welch Xtimate®C18, 250*50 mm, 10 um, 120A column; Flow Rate: 80 mL/min; Wavelength: UV 220 nm&254 nm; Oven Tem. Room temperature

[0822] Analysis LCMS Method: Mobile Phase: 0.1% TFA in water (solvent A) and 0.1% TFA in acetonitrile (solvent B), using the elution gradient 10%-80% (solvent B) over 0.9 minutes and using the elution gradient 80%-90% for 0.6 minutes at a flow rate of 1.0 ml/min; Column: Xbrige C18,3.5 um, 2.1*30 mm; Wavelength: UV 220 nm&254 nm; Column temperature: 30° C.; MS ionization: ESI

### Examples

### EXAMPLE 1: SYNTHESIS OF SEQ ID 57

[chemical structure]

[0823] The peptide was synthesized using standard Fmoc chemistry.
[0824] 1) Add DMF to the vessel containing MBHA Resin (0.20 mmol, 0.64 g, sub: 0.31 mmol/g) and swell for 1-4 hours.
[0825] 2) Add 20% piperidine/DMF and mix for 30 min.
[0826] 3) Drain and then DMF wash 30 sec with 5 times.
[0827] 4) Add Fmoc-amino acid solution and mix 30 seconds, then add activation buffer, N₂ bubbling for about 2 hour
[0828] 5) Add 20% piperidine/DMF and mix for 30 min
[0829] 6) Repeat step 2 to 5 for next amino acid coupling. The coupling reaction was monitored by ninhydrin or tetrachlor color test, and the resin was washed with DMF for 5 times. The resin was washed with MeOH for 3 times and dried by vacuum

[0830] Monitored method:
[0831] 1. Ninhydrin test: A: 5% ninhydrin/EtOH; B: 80% phenol/EtOH; C: pyridine
[0832] 2. Tetrachlor color test: A: 2% tetrachlor/DMF; B: 2% aldehyde/DMF 110° C. for 3 min

### Peptide Cleavage:

[0833] 1) Add cleavage buffer (5.0% DTT/2.5% H₂O/2.5% TIS/90% TFA) 12 mL to the flask containing the side chain protected peptide at room temperature and stir for 3 hrs.
[0834] 2) Filtered washed with 5 mL TFA. The combined filtrate was precipitated with cold methyl tertbutyl ether (MTBE). The mixture was centrifuged (3000 rpm, 3 min) and decanted. The pellet was washed with MTBE and centrifuged.
[0835] 3) Lyophilized the residue to give the intermediate 1 (350 mg, crude) Peptide Cyclization and Purification:

[0836] Crude peptide intermediate 1 (350 mg, 0.179 mmol) was dissolved in 20% MeCN/H2O (200 mL). To a stirred solution of the peptide was added the iodine solution in MeOH (0.1M, 0.8 mL) drop-wise until solution remains yellow. After ˜2h LCMS showed the reaction was complete. Excess iodine was quenched by the addition of 1M Na₂S₂O₃ in water (15 uL) (turned colorless instantly). Added 10-20 mL of MeCN to decrease turbidity.

[0837] Purified the solution by Prep-HPLC (A: 0.075% TFA in H₂O, B: ACN) (Note 1: Method A) to give SEQ ID 57 (122.7 mg, 97.3% purity, 30.6% yield for this step; over all yield: 27.2%) obtained as white solid. Analysis was performed using a C18 column with a flow rate of 1 mL/min (Note 2). LCMS Summary: calculated MW: 1953.29, observed MW: 977.1 [(M+2H)/2]

### Example 2: Synthesis of Seq Id 67

[chemical structure]

[0838] The peptide was synthesized using standard Fmoc chemistry.
[0839] 1) Add DMF to the vessel containing Methyl Indole AM resin (0.20 mmol, 0.29 g, sub: 0.69 mmol/g) and swell for 2 hours.
[0840] 2) Add 20% piperidine/DMF and mix for 30 min.
[0841] 3) Drain and then DMF wash 30 sec with 5 times.
[0842] 4) Add Fmoc-amino acid solution and mix 30 seconds, then add activation buffer, N₂ bubbling for about 1-4 hours
[0843] 5) Add 20% piperidine/DMF and mix for 30 min
[0844] 6) Repeat step 2 to 5 for next amino acid coupling. The coupling reaction was monitored by ninhydrin or tetrachlor color test, and the resin was washed with DMF for 5 times. The resin was washed with MeOH for 3 times and dried by vacuum

[0845] Monitored method:
[0846] 1. Ninhydrin test: A: 5% ninhydrin/EtOH; B: 80% phenol/EtOH; C: pyridine
[0847] 2. Tetrachlor color test: A: 2% tetrachlor/DMF; B: 2% aldehyde/DMF 110° C. for 3 min

### Peptide Cleavage:

[0848] 1) Add cleavage buffer (5.0% DTT/2.5% H₂O/2.5% TIS/90% TFA) 12 mL to the flask containing the side chain protected peptide at room temperature and stir for 3 hrs.
[0849] 2) Filtered washed with 5 mL TFA. The combined filtrate was precipitated with cold methyl tertbutyl ether (MTBE). The mixture was centrifuged (3000 rpm, 3 min) and decanted. The pellet was washed with MTBE and centrifuged.
[0850] 3) Lyophilized the residue to give the intermediate 2 (350 mg, crude)

### Peptide Cyclization and Purification:

[0851] Crude peptide intermediate 2 (350 mg, 0.174 mmol) was dissolved in 20% MeCN/H2O (200 mL). To a stirred solution of the peptide was added the iodine solution in MeOH (0.1M, 1.5 mL) drop-wise until solution remains yellow. After ˜2h LCMS showed the reaction was complete. Excess iodine was quenched by the addition of 1M Na₂S₂O₃ in water (15 uL) (turned colorless instantly). Added 10-20 mL of MeCN to decrease turbidity.

[0852] Purified the solution by Prep-HPLC (A: 0.075% TFA in H₂O, B: ACN) (Note 1: Method A) to give SEQ ID 67 (85.9 mg, 97.7% purity, 21.5% yield for this step; over all yield: 18.7%) obtained as white solid. Analysis was performed using a C18 column with a flow rate of 1 mL/min (Note 2). LCMS Summary: calculated MW: 2009.39, observed MW: 1005.0 [(M+2H)/2], 670.3 [(M+3H)/3].

### EXAMPLE 3: SYNTHESIS OF SEQ ID 68

[chemical structure]

[chemical structure]

[chemical structure]

[0853] The peptide was synthesized using standard Fmoc chemistry.
[0854] 1) Add DMF to the vessel containing Sar-CTC Resin (0.30 mmol, 0.96 g, sub: 0.31 mmol/g) and swell for 2 hours.
[0855] 2) Add 20% piperidine/DMF and mix for 30 min.
[0856] 3) Drain and then DMF wash 30 sec with 5 times.
[0857] 4) Add Fmoc-amino acid solution and mix 30 seconds, then add activation buffer, N₂ bubbling for about 1-4 hours
[0858] 5) Add 20% piperidine/DMF and mix for 30 min
[0859] 6) Repeat step 2 to 5 for next amino acid coupling. The coupling reaction was monitored by ninhydrin or tetrachlor color test, and the resin was washed with DMF for 5 times. The resin was washed with MeOH for 3 times and dried by vacuum

[0860] Monitored method:
[0861] 1. Ninhydrin test: A: 5% ninhydrin/EtOH; B: 80% phenol/EtOH; C: pyridine 2. Tetrachlor color test: A: 2% tetrachlor/DMF; B: 2% aldehyde/DMF 110° C. for 3 min Peptide Cleavage (General procedure for preparation of intermediate 3b):
[0862] 1) Add cleavage buffer (20% HFIP/DCM) 50 mL to the peptide Resin stirring for 30 min for 3 times.
[0863] 2) The DCM was concentrated under reduced pressure.
[0864] 3) Dissolved the crude peptide in ACN/water and lyophilized overnight. to give the intermediate 3b (300 mg, crude)

### General Procedure for Preparation of Intermediate 3c

[0865] To a solution of compound 3b (300 mg, 0.10 mmol) in DMF (5.00 mL) was added dimethylamine hydrochloride (16.3 mg, 2.00 eq), DIC (30.9 uL, 2.00 eq), HOAT (27 mg, 2.00 eq) and DIEA (34 uL, 2.00 eq). The mixture was stirred at 25° C. for 1 h. The reaction was monitored by LCMS, LCMS showed the starting material didn't react completely, then added one equivalent of dimethylamine hydrochloride, DIC, HOAT and DIEA for 16 h, LCMS showed starting material was consumed received desired mass. The filtrate was precipitated with cold methyl tertbutyl ether (MTBE) (50 mL) and centrifuged (3000 rpm, 3 min) to get an oily liquid, the isopropyl ether was dried with nitrogen to get intermediate 3c.

### General Procedure for Preparation of Intermediate 3d

[0866] 1) Add cleavage buffer (5.0% DTT/2.5% H₂O/2.5% TIS/90% TFA) 30 mL to the flask containing the side chain protected peptide at room temperature and stir for 3 hrs.
[0867] 2) Filtered washed with 5 mL TFA. The combined filtrate was precipitated with cold methyl tertbutyl ether (MTBE). The mixture was centrifuged (3000 rpm, 3 min) and decanted. The pellet was washed with MTBE and centrifuged.
[0868] 3) Lyophilized the residue to give the intermediate 3d (350 mg, crude)

### General Procedure for Preparation of SEQ ID 68

[0869] Crude peptide intermediate 3d (350 mg, 0.168 mmol) was dissolved in 20% MeCN/H2O (300 mL). To a stirred solution of the peptide was added the iodine solution in MeOH (0.1M, 1.5 mL) drop-wise until solution remains yellow. After ˜2h LCMS showed the reaction was complete. Excess iodine was quenched by the addition of 1M Na₂S₂O₃ in water (15 uL) (turned colorless instantly). Added 10-20 mL of MeCN to decrease turbidity. Purified the solution by Prep-HPLC (A: 0.075% TFA in H₂O, B: ACN) (Note 1: Method A) to give SEQ ID 68 (49.7 mg, 95.0% purity, 12.1% yield for this step; over all yield: 6.83%) obtained as white solid. Analysis was performed using a C18 column with a flow rate of 1 mL/min (Note 2). LCMS Summary: calculated MW: 2077.39, observed MW: 1039.6 [(M+2H)/2], 693.5 [(M+3H)/3].

### Example 4: Synthesis of Seq Id 82

[chemical structure]

[0870] The peptide was synthesized using standard Fmoc chemistry.
[0871] 7) Add DMF to the vessel containing MBHA Resin (0.20 mmol, 0.64 g, sub: 0.31 mmol/g) and swell for 2 hours.
[0872] 8) Add 20% piperidine/DMF and mix for 30 min.
[0873] 9) Drain and then DMF wash 30 sec with 5 times.
[0874] 10) Add Fmoc-amino acid solution and mix 30 seconds, then add activation buffer, N₂ bubbling for about 1-4 hours
[0875] 11) Add 20% piperidine/DMF and mix for 30 min
[0876] 12) Repeat step 2 to 5 for next amino acid coupling. The coupling reaction was monitored by ninhydrin or tetrachlor color test, and the resin was washed with DMF for 5 times. The resin was washed with MeOH for 3 times and dried by vacuum

[0877] Monitored method:
[0878] 1. Ninhydrin test: A: 5% ninhydrin/EtOH; B: 80% phenol/EtOH; C: pyridine
[0879] 2. Tetrachlor color test: A: 2% tetrachlor/DMF; B: 2% aldehyde/DMF 110° C. for 3 min

### Peptide Cleavage:

[0880] 4) Add cleavage buffer (5.0% DTT/2.5% H₂O/2.5% TIS/90% TFA) 12 mL to the flask containing the side chain protected peptide at room temperature and stir for 3 hrs.
[0881] 5) Filtered washed with 5 mL TFA. The combined filtrate was precipitated with cold methyl tertbutyl ether (MTBE). The mixture was centrifuged (3000 rpm, 3 min) and decanted. The pellet was washed with MTBE and centrifuged.
[0882] 6) Lyophilized the residue to give the intermediate 4 (350 mg, crude)

### Peptide Cyclization and Purification:

[0883] Crude peptide intermediate 4 (350 mg, 0.17 mmol) was dissolved in 20% MeCN/H2O (200 mL). To a stirred solution of the peptide was added the iodine solution in MeOH (0.1M, 0.8 mL) drop-wise until solution remains yellow. After ˜2h LCMS showed the reaction was complete. Excess iodine was quenched by the addition of 1M Na₂S₂O₃ in water (15 uL) (turned colorless instantly). Added 10-20 mL of MeCN to decrease turbidity. Purified the solution by Prep-HPLC (A: 0.075% TFA in H₂O, B: ACN) (Note 1: Method A) to give SEQ ID 82 (100.8 mg, 94.7% purity, 23.4% yield for this step; over all yield: 19.8%) obtained as white solid. Analysis was performed using a C18 column with a flow rate of 1 mL/min (Note 2). LCMS Summary: calculated MW: 2058.4, observed MW: 1029.5 [(M+2H)/2], 686.8 [(M+3H)/3].

### EXAMPLE 5: Synthesis of SEQ Id 105

[chemical structure]

### MeCO-k(Me)₃-Pen(3)—N(N(Me)₂)-T-7MeW—K(NMeAc)-Pen(3)-AEF(N(Me)₂)-2Nal-THP-E-N-3Pya-Sar-CON(Me)2

### Step A Synthesis of Intermediate 5

[0884] The peptide was synthesized by standard Solid-phase Peptide Synthesis (SPPS) using Fmoc/t-Bu chemistry. The assembly was performed on a Rink-amide AM resin (440 mol, 100-200Mesh; loading 0.35 mmol/g). First aminoacid was loaded manually using an equimolar solution of Fmoc-Asp-OAll, HOAt and DIC in DMF, at room temperature. Complete acylation was monitored by ninhhydrin test. The resin was then treated with 0.25Eq of Pd Tetrakis, 24 Eq of Phenylsilane in 5 ml of dry DCM under N2 atmosphere for 30 min (process repeated 2 times); washed with DCM, DMF and a solution of 0.5% sodium dimethyldithiocarbamate (0.5%) and DIPEA (0.5%) in DMF. Fmoc-OSu and DIPEA (1:1, 2Eq) in DCM were added and left under stirring at room temperature for 30 minutes. Further peptide elongation was performed manually preactivating the resin with HATU (1.2Eq), DIPEA (2.2Eq) and then adding solution of DIPEA (2.2Eq) and 3Pya-Sar-CON(Me)2 dimer (2.2Eq, TM83) in DMF. The reaction mixture was left under stirring for 1 hr at room temperature. Complete acylation was monitored by test cleavage. The resin was then placed in a MW reaction vessel and the assembly was continued on the Cem Liberty Blue microwave peptide synthesizer (CEM Inc.). During peptide assembly on solid phase, the side chain protecting groups were: tert-butyl for Thr and Glu; trityl for Pen and Asn. D-Lys(Me)₃ at position 3 was coupled manually using DIC-HOBt (3Eq, 1:1:1) using MW irradiation (90° C., 5 min) and complete acylation was monitored by ninhhydrin test.

[0885] All the amino acids were dissolved at a 0.4 M concentration in DMF. The acylation reactions were performed for 3 min at 90° C. under MW irradiation with 5 folds excess of activated amino acids over the resin free amino groups. The amino acids were activated with equimolar amounts of 0.5M solution of DIC in DMF and Oxyma solution 1M in DMF. Double acylation reactions were performed for 3Pya15 & 2Nal10. Fmoc deprotections were performed using 20%(V/V) piperidine in DMF. Capping of the free amino group was performed manually using 10eq of acetic anhydride in DMF.

[0886] At the end of the assembly the resin was washed with DMF, MeOH, DCM, Et2O. The peptide was cleaved from solid support using 15 ml of TFA solution (v/v) (87.5% TFA, 5% H2O, 2.5% TIPS, 5% Phenol) for approximately 1.5 hours, at room temperature. The resin was then filtered and precipitated in cold MTBE (135 mL). After centrifugation, the peptide pellets were washed with fresh cold diethyl-ether to remove the organic scavengers. The process was repeated twice. Final pellets were dried, re-suspended in H2O and acetonitrile 1:1+0.1% TFA and stirred overnight. Then lyophilized to afford the desired linear intermediate 5 (Y=84%). LCMS anal. calc. For C₁₀₆H155N22023S2+: 2169.66 Da; found; 1085.2 (M+2)²⁺Step B Synthesis of SEQ ID 105

[0887] The crude peptide was dissolved in ACN\H2O (5 mg\ml). Saturated Iodine in acetic acid was then added dropwise under stirring until yellow color persisted. Rxn was completed in 30 min (monitored by UPLC-MS). Solid ascorbic acid was added until the solution became clear. After lyophilization the cyclized peptide was purified by reverse-phase HPLC using preparative Waters DeltaPak C4 (200×mm, 300A, 15 μm). Mobile phase A: +0.1% TFA, mobile phase B: Acetonitrile (ACN)+0.1% TFA. The following gradient of eluent B was used: 15% B to 15% B over 5 min, to 30% B over 25 min, flow rate 80 mL/min, wavelength 214 nm. Collected fractions were lyophilized to afford SEQ ID 105 (Y=13.4%). LCMS anal. calc. For C₁₀₆H153N22023S2+: 2167.64 Da; found; 1084.2 (M+2)²⁺

### EXAMPLE 6: Synthesis of SEQ ID 112

[chemical structure]

### MeCO-Pen(3)—N-T-7MeW—K(Ac)-Pen(3)-AEF-2Nal-THIP-E-N-3Pya-Sar-COMor

[chemical structure]

[chemical structure]

[chemical structure]

### Step A Synthesis of Intermediate 6

[0888] Synthesis was performed using Fmoc-protected amino acids on a solid-phase H-Sar-2-Chlorotrityl resin (AAPPTEC RTG103, 0.3 meq/g, 100-200 mesh) with a CEM Liberty Blue automated microwave peptide synthesizer. Peptide was synthesized on a 0.25 mmol scale. Typical reaction conditions were as follows: Deprotection Conditions: Fmoc deprotection was carried out in 2 stages using 20% piperidine in DMF (10 mL) under microwave conditions (50° C., 2.5 min; 50° C., 5 min). Residue Coupling Conditions: Fmoc-protected amino acid (5 mL of a 0.2 M amino acid stock solution in DMF, 1 mmol) was delivered to the rein, followed by HA TU (2 mL of a 0.45 M stock solution in DMF, 0.9 mmol), and N,N-diisopropylethylamine (1 mL of 2 M solution in NMP, 2 mmol) and allowed to react for 15 min at 50° C. Double couplings were used for 3Pya, THP, and Thr and for residues incorporated after THP and Thr (2Nal and Asn). The peptide was capped with 20% Ac₂O in DMF (10 mL). At the end of the assembly, the peptide resin intermediate 6 was washed with DMF and DCM.

### Step B —Synthesis of Intermediate 6a

[0889] Cleavage of 2CTrt resin was carried out by treating the intermediate 6 (0.125 mmol) with a solution of 2,2,2-trifluoroethanol/DCM (2/8, 5 mL) for 1 hr at room temperature. The resin was filtered off and the filtrate was collected. The same operation was repeated three times. The resin was then washed with of 2,2,2-trifluoroethanol/DCM (2/8, 8 mL) three times. The solutions were combined and evaporated to dryness to afford a light yellow solid as intermediate 6a. (Yield: 39%). LCMS anal. calc. For C₁₇₉H₂₀₁N₁₉O₂₅S₂: 3080.4; found: 1552 (M+1+23)²⁺

### Step C-Synthesis of Intermediate 6b

[0890] To a solution of intermediate 6a (100 mg, 0.0324 mmol) in DMF (1.0 mL) was added HATU (24.7 mg, 0.0649 mmol), morpholine (5.65 mg, 0.0649 mmol) and Hunig's base (0.0112 mL, 0.75 g/mL, 0.0649 mmol). The reaction mixture was then stirred at room temperature for 30 mins. The reaction mixture was then concentrated to give intermediate 6b as a crude and used for the next step. LCMS anal. calc. for C₁₈₃H₂₀₈N₂₀O₂₅S₂: 3149.5; found: 1587 (M+1+23)²⁺

### Step D —Synthesis of Intermediate 6c

[0891] Intermediate 6c was treated with a cocktail solution of TFA/H₂O/DODT/TIPS 92.5/2.5/2.5/2.5 (1 mL) for 30 mins at 42° C. on a CEM Razor cleavage station. The mixture was then concentrated and then added to cold methyl-t-butyl ether in order to precipitate the peptide. After centrifugation, the peptide pellets were washed with fresh cold methyl-t-butyl ether to remove the organic scavengers. The process was repeated twice. Final pellets were dried, re-suspended in H₂O and acetonitrile, then lyophilized to afford the desired protected intermediate 6d as a light yellow solid. (Yield: 78%). LCMS anal. calc. for C₉₄H₁₂₈N₂₀O₂₃S₂: 1968.9; found: 985.4 (M+2)²⁺

### Step E —Synthesis of SEO ID 112

[0892] The intermediate 6c from Step D was dissolved in 40% ACN/water (50 mL). Iodine in methanol (0.1 M) was then added drop wise with stirring until yellow color persisted. The reaction was monitored with UPLC-MS. When the reaction was complete, solid ascorbic acid was added until the solution became clear. The solvent mixture was then lyophilized and the resulting material was then dissolved in DMSO and was purified by C18 reverse-phase HPLC (Waters XBridge OBD C18, 50×150 mm, 5 um, 130A&), using as eluents (A) 0.1% TFA in water and (B) 0.1% TFA in acetonitrile, gradient began with 15% B, and changed to 30% B over 25 minutes at a flow rate of 80 ml/min). Fractions containing pure product were collected and then freeze-dried to afford the desired product as a white powder. (Yield: 12.6%). LCMS anal. Calcd for C₉₄H₁₂₆N₂₀O₂₃S₂: 1966.88; found: 985.1 (M+2)²⁺

### Example 7: Synthesis of Seq Id 137

[chemical structure]

[0893] The peptide was synthesized using standard Fmoc chemistry.
[0894] 1) Add DMF to the vessel containing MBHA Resin (3.0 mmol, 9.67 g, sub: 0.31 mmol/g) and swell for 2 hours.
[0895] 2) Add 20% piperidine/DMF and mix for 30 min.
[0896] 3) Drain and then DMF wash 30 sec with 5 times.
[0897] 4) Add Fmoc-amino acid solution and mix 30 seconds, then add activation buffer, N2 bubbling for about 1-4 hours
[0898] 5) Add 20% piperidine/DMF and mix for 30 min
[0899] 6) Repeat step 2 to 5 for next amino acid coupling. The coupling reaction was monitored by ninhydrin or tetrachlor color test, and the resin was washed with DMF for 5 times. The resin was washed with MeOH for 3 times and dried by vacuum

[0900] Monitored method:
[0901] 1. Ninhydrin test: A: 5% ninhydrin/EtOH; B: 80% phenol/EtOH; C: pyridine
[0902] 2. Tetrachlor color test: A: 2% tetrachlor/DMF; B: 2% aldehyde/DMF 110° C. for 3 min

### Peptide Cleavage:

[0903] 1) Add cleavage buffer (5.0% DTT/2.5% H₂O/2.5% TIS/90% TFA) 180 mL to the flask containing the side chain protected peptide at room temperature and stir for 3 hrs.
[0904] 2) Filtered washed with 50 mL TFA. The combined filtrate was precipitated with cold methyl tertbutyl ether (MTBE). The mixture was centrifuged (3000 rpm, 3 min) and decanted. The pellet was washed with MTBE and centrifuged.
[0905] 3) Lyophilized the residue to give the intermediate 7 (6.0 g, crude)

### Peptide Cyclization and Purification:

[0906] Crude peptide intermediate 7 (6.0 g, 2.89 mmol) was dissolved in 20% MeCN/H2O (3000 mL). To a stirred solution of the peptide was added the iodine solution in MeOH (0.1M, 12.0 mL) drop-wise until solution remains yellow. After ˜2h LCMS showed the reaction was complete. Excess iodine was quenched by the addition of 1M Na₂S₂O₃ in water (15 uL) (turned colorless instantly). Added 100-200 mL of MeCN to decrease turbidity. Purified the solution by Prep-HPLC (A: 0.075% TFA in H₂O, B: ACN) (Note 1: Method C) and re-purify by Prep-HPLC (A: 0.5% AcOH in H₂O, B: ACN) (Note 1: Method D), then the product was re-lyophilized with 0.1% TFA mobile phase to give SEQ ID 137 (2448.5 mg, 97.7% purity, 36.7% yield for this step; over all yield: 35.4%) obtained as white solid. Analysis was performed using a C18 column with a flow rate of 1 mL/min (Note 2).

[0907] LCMS Summary: calculated MW: 2071.4, observed MW: 1036.0 [(M+2H)/2], 691.1 [(M+3H)/3].

### EXAMPLE 8: Synthesis of SEQ ID 145

[chemical structure]

### cPEG5aCO-Pen(3)—N(N(Me)₂)-T-7MeW-Dab(NMecPEG5aCO)-Pen(3)-AEF(N(Me)₂)-2Nal-THP-E-N-3Pya-Sar-CON(Me)2

### Step A Synthesis of Intermediate 8

[0908] The peptide was synthesized by standard Solid-phase Peptide Synthesis (SPPS) using Fmoc/t-Bu chemistry. The assembly was performed on a Rink-amide AM resin (220 mol, 100-200Mesh; loading 0.35 mmol/g). First amino acid was loaded manually using an equimolar solution of Fmoc-Asp-OAll, HOAt and DIC in DMF, at room temperature. Complete acylation was monitored by ninhhydrin test. The resin was then treated with 0.25Eq of Pd Tetrakis, 24 Eq of Phenylsilane in 5 ml of dry DCM under N2 atmosphere for 30 min (process repeated 2 times); washed with DCM, DMF and a solution of 0.5% sodium dimethyldithiocarbamate (0.5%) and DIPEA (0.5%) in DMF. Fmoc-OSu and DIPEA (1:1, 2Eq) in DCM were added and left under stirring at room temperature for 30 minutes. Further peptide elongation was performed manually preactivating the resin with HATU (1.2Eq), DIPEA (2.2Eq) and then adding solution of DIPEA (2.2Eq) and 3Pya-Sar-CON(Me)₂ dimer (2.2Eq, TM83) in DMF. The reaction mixture was left under stirring for 1 hr at room temperature. Complete acylation was monitored by test cleavage. The resin was then placed in a MW reaction vessel and the assembly continued on the Cem Liberty Blue microwave peptide synthesizer (CEM Inc.). During peptide assembly on solid phase, the side chain protecting groups were: tert-butyl for Thr and Glu; trityl for Pen and Asn. All the amino acids were dissolved at a 0.4 M concentration in DMF. The acylation reactions were performed for 3 min at 90° C. under MW irradiation with 5 folds excess of activated amino acids over the resin free amino groups. The amino acids were activated with equimolar amounts of 0.5M solution of DIC in DMF and Oxyma solution 1M in DMF. Double acylation reactions were performed for 3Pya15 & 2Nal10. Fmoc deprotections were performed using 20%(V/V) piperidine in DMF. Capping of the free amino group was performed manually using cPEG5aCOOH (2.2 Eq), HATU (2 Eq) and DIPEA(4Eq) at room temperature and complete acylation was monitored by ninhhydrin test.

[0909] The resin was then treated with 0.25Eq of Pd Tetrakis, 24 Eq of phenylsilane in 5 ml of DCM Dry under N2 atmosphere for 30 min (process repeated 2 times); washed with DCM, DMF and a solution of 0.5% sodium dimethyldithiocarbamate (0.5%) and DIPEA (0.5%) in DMF. Further side chain derivatization was performed manually with HATU (2Eq), DIPEA (4Eq) and 2.2Eq of cPEG5aCOOH. Reaction was completed after 2 hr (monitored by ninhhydrin test).

[0910] At the end of the assembly the resin was washed with DMF, MeOH, DCM, Et2O. The peptide was cleaved from solid support using 30 ml of TFA solution (v/v) (87.5% TFA, 5% H₂O, 2.5% TIPS, 5% Phenol) for approximately 1.5 hours, at room temperature. The resin was then filtered and precipitated in cold MTBE (135 mL). After centrifugation, the peptide pellets were washed with fresh cold diethyl-ether to remove the organic scavengers. The process was repeated twice. Final pellets were dried, re-suspended in H2O and acetonitrile 1:1+0.1% TFA and stirred overnight. Then lyophilized to afford the desired linear intermediate 8 (Y=93%). LCMS anal. calc. For C106H155N22O23S2+: 2438.97 Da Da; found; 1219.4 (M+2)²⁺

### Step B Synthesis of SEQ ID 145

[0911] The crude peptide was dissolved in ACN\H2O (5 mg\ml). Saturated Iodine in acetic acid was then added dropwise under stirring until yellow color persisted. Rxn was completed in 30 min (monitored by UPLC-MS). Solid ascorbic acid was added until the solution became clear. After lyophilization the cyclized peptide was purified by reverse-phase HPLC using preparative Waters DeltaPak C4 (200×mm, 300A, 15 μm). Mobile phase A: +0.1% TFA, mobile phase B: Acetonitrile (ACN)+0.1% TFA. The following gradient of eluent B was used: 15% B to 15% B over 5 min, to 30% B over 25 min, flow rate 80 mL/min, wavelength 214 nm. Collected fractions were lyophilized to afford SEQ ID 145 (Y=10%) LCMS anal. calc. For C₁₁₇H178N22030S22+: 2436.95 Da; found; 1218.5 (M+2)²⁺

### Example 9:Synthesis of Seq Id 164

[chemical structure]

[chemical structure]

[0912] The peptide was synthesized using standard Fmoc chemistry.
[0913] 1) Add DMF to the vessel containing Rink Amide MBHA resin (15.0 mmol, 50 g, sub: 0.3 mmol/g) and swell for 2 hours.
[0914] 2) Add 20% piperidine/DMF and mix for 30 min.
[0915] 3) Drain and then DMF wash 30 sec with 5 times.
[0916] 4) Add Fmoc-amino acid solution and mix 30 seconds, then add activation buffer, N₂ bubbling for about 1-5 hours
[0917] 5) Add 20% piperidine/DMF and mix for 30 min
[0918] 6) Repeat step 2 to 5 for next amino acid coupling. The coupling reaction was monitored by ninhydrin or tetrachlor color test, and the resin was washed with DMF for 5 times. The resin was washed with MeOH for 3 times and dried by vacuum.

[0919] Monitored method:
[0920] 1. Ninhydrin test: A: 5% ninhydrin/EtOH; B: 80% phenol/EtOH; C: pyridine
[0921] 2. Tetrachlor color test: A: 2% tetrachlor/DMF; B: 2% aldehyde/DMF 110° C. for 3 min

### Peptide Cleavage:

[0922] 1) Add cleavage buffer (5.0% DTT/2.5% H₂O/2.5% TIS/90% TFA) 1000 mL to the flask containing the side chain protected peptide at room temperature and stir for 3 hrs.
[0923] 2) Filtered washed with 100 mL TFA. The combined filtrate was precipitated with cold methyl tertbutyl ether (MTBE). The mixture was centrifuged (3000 rpm, 3 min) and decanted. The pellet was washed with MTBE and centrifuged.
[0924] 3) Lyophilized the residue to give the intermediate 9d (30.0 g, crude)

### Peptide Cyclization and Purification:

[0925] The reaction was performed for 3 batches in parallel. Crude peptide intermediate 9d (10.0 g, 4.4 mmol) was dissolved in 20% MeCN/H₂O (5.0 L). To a stirred solution of the peptide was added the iodine solution in MeOH (0.1M, 15 mL) drop-wise until solution remains yellow. After ˜2h LCMS showed the reaction was complete. Excess iodine was quenched by the addition of 1M Na₂S₂O₃ in water (15 uL) (turned colorless instantly). Added 100-200 mL of MeCN to decrease turbidity. Purified the solution by Prep-HPLC (A: 0.075% TFA in H₂O, B: ACN) (Note 1: Method E) and re-purified by Prep-HPLC (A: 0.5% AcOH in H₂O, B: ACN) (Note 1: Method F) to give SEQ ID 164 (3.5 g, 92.2% purity, 9.9% yield for this step; over all yield: 8.7%) obtained as white solid. Analysis was performed using a C18 column with a flow rate of 1 mL/min (Note 2). LCMS Summary: calculated MW: 2268.8, observed MW: 1133.8 [(M+2H)/2], 756.2 [(M+3H)/3].

### Example 10: Synthesis of Seq Id 181

[chemical structure]

[chemical structure]

[0926] The peptide was synthesized using standard Fmoc chemistry.
[0927] 1) Add DMF to the vessel containing Rink Amide MBHA resin (15.0 mmol, 43 g, sub: 0.35 mmol/g) and swell for 2 hours.
[0928] 2) Add 20% piperidine/DMF and mix for 30 min.
[0929] 3) Drain and then DMF wash 30 sec with 5 times.
[0930] 4) Add Fmoc-amino acid solution and mix 30 seconds, then add activation buffer, N₂ bubbling for about 1-4 hours
[0931] 5) Add 20% piperidine/DMF and mix for 30 min
[0932] 6) Repeat step 2 to 5 for next amino acid coupling. The coupling reaction was monitored by ninhydrin or tetrachlor color test, and the resin was washed with DMF for 5 times. The resin was washed with MeOH for 3 times and dried by vacuum.

[0933] Monitored method:
[0934] 1. Ninhydrin test: A: 5% ninhydrin/EtOH; B: 80% phenol/EtOH; C: pyridine
[0935] 2. Tetrachlor color test: A: 2% tetrachlor/DMF; B: 2% aldehyde/DMF 110° C. for 3 min

### Peptide Cleavage:

[0936] 1) Add cleavage buffer (5.0% DTT/2.5% H₂O/2.5% TIS/90% TFA) 1000 mL to the flask containing the side chain protected peptide at room temperature and stir for 3 hrs.
[0937] 2) Filtered washed with 100 mL TFA. The combined filtrate was precipitated with cold methyl tertbutyl ether (MTBE). The mixture was centrifuged (3000 rpm, 3 min) and decanted. The pellet was washed with MTBE and centrifuged.
[0938] 3) Lyophilized the residue to give the intermediate 10 (30.0 g, crude)

### Peptide Cyclization and Purification:

[0939] The reaction was performed for 3 batches in parallel. Crude peptide intermediate 10 (10.0 g, 4.3 mmol) was dissolved in 20% MeCN/H2O (5.0 L). To a stirred solution of the peptide was added the iodine solution in MeOH (0.1M, 17 mL) drop-wise until solution remains yellow. After ˜2h LCMS showed the reaction was complete. Excess iodine was quenched by the addition of 1M Na₂S₂O₃ in water (15 uL) (turned colorless instantly). Added 100-200 mL of MeCN to decrease turbidity. Purified the solution by Prep-HPLC (A: 0.075% TFA in H₂O, B: ACN) (Note 1: Method E) and re-purified by Prep-HPLC (A: 0.5% AcOH in H₂O, B: ACN) (Note 1: Method F) to give SEQ ID 181 (4.5 g, 96.6% purity, 14.5% yield for this step, over all yield: 12.5% yield) obtained as white solid.

[0940] Analysis was performed using a C18 column with a flow rate of 1 mL/min (Note 2). LCMS Summary: calculated MW: 2314.8, observed MW: 1157.3 [(M+2H)/2], 771.7 [(M+3H)/3].

### Example 11:Synthesis of Seq Id 217

[chemical structure]

[chemical structure]

[chemical structure]

[0941] The peptide was synthesized using standard Fmoc chemistry.
[0942] 1) Add DMF to the vessel containing Rink Amide MBHA resin (0.50 mmol, 1.78 g, sub: 0.28 mmol/g) and swell for 2 hours.
[0943] 2) Add 20% piperidine/DMF and mix for 30 min.
[0944] 3) Drain and then DMF wash 30 sec with 5 times.
[0945] 4) Add Fmoc-amino acid solution and mix 30 seconds, then add activation buffer, N₂ bubbling for about 1-4 hours
[0946] 5) Add 20% piperidine/DMF and mix for 30 min
[0947] 6) Repeat step 2 to 5 for next amino acid coupling. The coupling reaction was monitored by ninhydrin or tetrachlor color test, and the resin was washed with DMF for 5 times. The resin was washed with MeOH for 3 times and dried by vacuum.

[0948] Monitored method:
[0949] 1. Ninhydrin test: A: 5% ninhydrin/EtOH; B: 80% phenol/EtOH; C: pyridine
[0950] 2. Tetrachlor color test: A: 2% tetrachlor/DMF; B: 2% aldehyde/DMF 110° C. for 3 min

### Peptide Cleavage:

[0951] 4) Add cleavage buffer (5.0% DTT/2.5% H₂O/2.5% TIS/90% TFA) 35 mL to the flask containing the side chain protected peptide at room temperature and stir for 3 hrs.
[0952] 5) Filtered washed with 5 mL TFA. The combined filtrate was precipitated with cold methyl tertbutyl ether (MTBE). The mixture was centrifuged (3000 rpm, 3 min) and decanted. The pellet was washed with MTBE and centrifuged.
[0953] 6) Lyophilized the residue to give the intermediate 11 (1.0 g, crude)

### Peptide Cyclization and Purification:

[0954] Crude peptide intermediate 11 (1.0 g, 0.43 mmol) was dissolved in 20% MeCN/H2O (500 mL). To a stirred solution of the peptide was added the iodine solution in MeOH (0.1M, 6.0 mL) drop-wise until solution remains yellow. After ˜2h LCMS showed the reaction was complete. Excess iodine was quenched by the addition of 1M Na₂S₂O₃ in water (turned colorless instantly). Added 10 mL of MeCN to decrease turbidity. Purified the solution by Prep-HPLC (A: 0.075% TFA in H₂O, B: ACN) (Note 1: Method B) to give SEQ ID 217 (139.8 mg, 98.9% purity, 12.0% yield for this step, over all yield: 10.4% yield) obtained as white solid. Analysis was performed using a C18 column with a flow rate of 1 mL/min (Note 2). LCMS Summary: calculated MW: 2314.8, observed MW: 1157.2 [(M+2H)/2], 771.6 [(M+3H)/3].

### Biological Assays

### IL23R Reporter Assay

[0955] Compounds were serially diluted in 100% (v/v) DMSO) and plated using an Echo acoustic dispenser (Labcyte) into 1536-well non-treated black assay plates (Corning #9146). 3 μL of HEK293 cells containing IL-23R, IL-12RP1 and a firefly luciferase reporter gene driven by a STAT-inducible promoter (Promega) were added to the plates (4000 cells/well), followed by 3 μL of 10 ng/mL IL-23 (equivalent to EC₉₀ concentration). After 5 h at 37° C., 5% CO₂, 95% relative humidity, cells were placed at 20° C. and treated with BioGlo reagent (Promega) according to the Manufacturer's instructions. Luminescence was measured on a Pherastar FSX (BMG LabTech). Data were normalized to IL-23 treatment (0% inhibition) and 30 μM of control inhibitor (100% inhibition), and IC₅₀ values were determined using a 4-parameter Hill equation. Data for exemplary compounds are shown in Tables 3a and 3b.

TABLE 3
IL-23R Reporter Assay Data

| | IL23R |
|---|---|
| | Reporter |
| SEQ | Assay |
| ID | (micromolar) |
| 1 | ~6.29 |
| 2 | 1.05 |
| 3 | 2 |
| 4 | 0.29 |
| 5 | 0.053 |
| 6 | 0.064 |
| 7 | 0.51 |
| 8 | 0.089 |
| 9 | 0.053 |
| 10 | 0.23 |
| 11 | >16.61 |
| 12 | >16.61 |
| 13 | 0.16 |
| 14 | 0.14 |
| 15 | 0.21 |
| 16 | 0.024 |
| 17 | 0.038 |
| 18 | 0.043 |
| 19 | 0.11 |
| 20 | 0.3 |
| 21 | 0.13 |
| 22 | 0.16 |
| 23 | 0.15 |
| 24 | 0.18 |
| 25 | 0.048 |
| 26 | 0.11 |
| 27 | 0.39 |
| 28 | 0.71 |
| 29 | 0.53 |
| 30 | 0.0035 |
| 31 | 0.32 |
| 32 | 0.016 |
| 33 | 0.5 |
| 34 | 0.33 |
| 35 | 0.0034 |
| 36 | 0.94 |
| 37 | 0.0053 |
| 38 | 0.0054 |
| 39 | 0.0055 |
| 40 | 0.0068 |
| 41 | 0.0045 |
| 42 | 0.0047 |
| 43 | 0.0068 |
| 44 | 0.0068 |
| 45 | 0.0071 |
| 46 | 0.0032 |
| 47 | 0.0039 |
| 48 | 0.73 |
| 49 | 0.0044 |
| 50 | 0.0036 |
| 51 | 0.026 |
| 52 | 0.0046 |
| 53 | 0.0039 |
| 54 | 0.0053 |
| 55 | 0.0025 |
| 56 | 0.0057 |
| 57 | 0.0029 |
| 58 | 0.0043 |
| 59 | 0.0047 |
| 60 | 0.0035 |
| 61 | 0.0033 |
| 62 | 0.0032 |
| 63 | 0.025 |
| 64 | 0.0049 |
| 65 | 0.0049 |
| 66 | 0.0028 |
| 67 | 0.0023 |
| 68 | 0.0029 |
| 69 | 0.0019 |
| 70 | 0.0035 |
| 71 | 0.0021 |
| 72 | 0.0025 |
| 73 | 0.0019 |
| 74 | 0.0024 |
| 75 | 0.0029 |
| 76 | 0.0032 |
| 77 | 0.0038 |
| 78 | 0.0039 |
| 79 | 0.0039 |
| 80 | 0.0043 |
| 81 | 0.0029 |
| 82 | 0.012 |
| 83 | 0.0033 |
| 84 | 0.0035 |
| 85 | 0.0037 |
| 86 | 0.0047 |
| 87 | 0.0042 |
| 88 | 0.0039 |
| 89 | 0.0027 |
| 90 | 0.0037 |
| 91 | 0.0028 |
| 92 | 0.0035 |
| 93 | 0.0036 |
| 94 | 0.0039 |
| 95 | 0.0048 |
| 96 | 0.0046 |
| 97 | 0.0058 |
| 98 | 0.0046 |
| 99 | 0.0039 |
| 100 | 0.0093 |
| 101 | 0.0052 |
| 102 | 0.0055 |
| 103 | 0.0054 |
| 104 | 0.0048 |
| 105 | 0.0062 |
| 106 | 0.0065 |
| 107 | 0.0045 |
| 108 | 0.0046 |
| 109 | 0.0062 |
| 110 | 0.0044 |
| 111 | 0.004 |
| 112 | 0.0053 |
| 113 | 0.0038 |
| 114 | 0.028 |
| 115 | 0.0026 |
| 116 | 0.0017 |
| 117 | 0.0022 |
| 118 | 0.0021 |
| 119 | 0.0063 |
| 120 | 0.0023 |
| 121 | 0.013 |
| 122 | 0.0021 |
| 123 | 0.0019 |
| 124 | 0.0021 |
| 125 | 0.002 |
| 126 | 0.0013 |
| 127 | 0.0026 |
| 128 | 0.00079 |
| 129 | 0.0016 |
| 130 | 0.0034 |
| 131 | 0.0023 |
| 132 | 0.0019 |
| 133 | 0.0019 |
| 134 | 0.0021 |
| 135 | 0.0037 |
| 136 | 0.0026 |
| 137 | 0.0036 |
| 138 | 0.0027 |
| 139 | 0.0034 |
| 140 | 0.003 |
| 141 | 0.0057 |
| 142 | 0.0066 |
| 143 | 0.0065 |
| 144 | 0.0025 |
| 145 | 0.0057 |
| 146 | 0.0038 |
| 147 | 0.0038 |
| 148 | 0.0026 |
| 149 | 0.0021 |
| 150 | 0.0033 |
| 151 | 0.0066 |
| 152 | 0.0016 |
| 153 | 0.27 |
| 154 | 0.0024 |
| 155 | 0.0022 |
| 156 | 0.002 |
| 157 | 0.0028 |
| 158 | 0.0039 |
| 159 | 0.0018 |
| 160 | 0.0024 |
| 161 | 0.004 |
| 162 | 0.0033 |
| 163 | 0.0032 |
| 164 | 0.0024 |
| 165 | 0.0043 |
| 166 | 0.003 |
| 167 | 0.0017 |
| 168 | 0.0025 |
| 169 | 0.0023 |
| 170 | 0.004 |
| 171 | 0.0029 |
| 172 | 0.0065 |
| 173 | 0.0031 |
| 174 | 0.0036 |
| 175 | 0.0063 |
| 176 | 0.0039 |
| 177 | 0.002 |
| 178 | 0.002 |
| 179 | 0.003 |
| 180 | 0.0029 |
| 181 | 0.002 |
| 182 | 0.0017 |
| 183 | 0.0018 |
| 184 | 0.0034 |
| 185 | 0.0019 |
| 186 | 0.0017 |
| 187 | 0.086 |
| 188 | 0.0023 |
| 189 | 0.005 |
| 190 | 0.0022 |
| 191 | 0.0025 |
| 192 | 0.0041 |
| 193 | 0.04 |
| 194 | 0.0035 |
| 195 | 0.0029 |
| 196 | 0.0039 |
| 197 | 0.0029 |
| 198 | 0.0031 |
| 199 | 0.003 |
| 200 | 0.0028 |
| 201 | 0.0022 |
| 202 | 0.0035 |
| 203 | 0.0016 |
| 204 | 0.0046 |
| 205 | 0.004 |
| 206 | 0.0026 |
| 207 | 0.0032 |
| 208 | 0.0032 |
| 209 | 0.0023 |
| 210 | 0.0022 |
| 211 | 0.0023 |
| 212 | 0.0031 |
| 213 | 0.0051 |
| 214 | 0.0059 |
| 215 | 0.0023 |
| 216 | 0.0029 |
| 217 | 0.0038 |
| 218 | 0.0038 |
| 219 | 0.0027 |
| 220 | 0.0014 |
| 221 | 0.0018 |
| 222 | 0.0033 |
| 223 | 0.0022 |
| 224 | 0.003 |
| 225 | 0.0041 |
| 226 | 0.0028 |
| 227 | 0.0039 |
| 228 | 0.0033 |
| 229 | 0.019 |
| 230 | 0.0038 |
| 231 | 0.0029 |
| 232 | 0.0034 |
| 233 | 0.003 |
| 234 | 0.0033 |
| 235 | 0.0033 |
| 236 | 0.003 |
| 237 | 0.0027 |
| 238 | 0.0035 |
| 239 | 0.0027 |
| 240 | 0.003 |
| 241 | 0.0024 |
| 242 | 0.025 |
| 243 | 0.0039 |
| 244 | 0.0041 |
| 245 | 0.042 |
| 246 | 0.0065 |
| 247 | ND |
| 248 | ND |
| 249 | 0.0036 |
| 250 | 0.0069 |
| 251 | 0.0029 |
| 252 | 0.0046 |
| 253 | 0.04 |
| 254 | 0.0011 |
| 255 | 0.022 |
| 256 | 0.12 |
| 257 | 0.0082 |
| 258 | 0.0069 |
| 259 | 0.27 |
| 260 | 0.0054 |
| 261 | 0.002 |
| 262 | 0.0036 |
| 263 | 0.005 |
| 264 | 0.0022 |
| 265 | 0.0064 |
| 266 | 0.0024 |
| 267 | 0.0042 |
| 268 | 0.11 |
| 269 | 0.0014 |
| 270 | 0.0022 |
| 271 | 0.0022 |
| 272 | 0.0022 |
| 273 | 0.0026 |
| 274 | ND |
| 275 | ND |
| 276 | 0.055 |
| 277 | 0.0029 |
| 278 | 0.0043 |
| 279 | 0.0023 |
| 280 | 0.0027 |
| 281 | 0.0016 |
| 282 | 0.0013 |
| 283 | 0.0036 |
| 284 | 0.0033 |
| 285 | 0.0038 |
| 286 | 0.0032 |
| 287 | 0.024 |
| 288 | 0.024 |
| 289 | 0.079 |
| 290 | 0.12 |
| 291 | 0.61 |
| 292 | 0.003 |
| 293 | 0.0032 |
| 294 | 0.0012 |
| 295 | 0.0024 |
| 296 | 0.0033 |
| 297 | 0.0018 |
| 298 | 0.0017 |
| 299 | 0.0019 |
| 300 | 0.0021 |
| 301 | 0.00073 |
| 302 | 0.0013 |
| 303 | 0.0036 |
| 304 | 0.0014 |
| 305 | 0.0024 |
| 306 | 0.0011 |
| 307 | 0.017 |
| 308 | 0.002 |
| 309 | 0.0011 |
| 310 | 0.0022 |
| 311 | 0.0013 |
| 312 | 0.0011 |
| 313 | 0.0042 |
| 314 | 0.007 |
| 315 | 0.0085 |
| 316 | 0.0013 |
| 317 | 0.0013 |
| 318 | 0.00089 |
| 319 | 0.0018 |
| 320 | 0.00095 |
| 321 | 0.0013 |
| 322 | 0.0048 |
| 323 | 0.094 |
| 324 | 0.0087 |
| 325 | 0.2 |
| 326 | 0.00085 |
| 327 | 0.0012 |
| 328 | 0.0012 |
| 329 | 0.0019 |
| 330 | 0.0013 |
| 331 | 0.0012 |
| 332 | 0.0012 |
| 333 | 0.0018 |
| 334 | 0.0011 |
| 335 | 0.0012 |
| 336 | 0.0015 |
| 337 | 0.0019 |
| 338 | 0.0016 |
| 339 | 0.0019 |
| 340 | 0.0028 |
| 341 | 0.00097 |
| 342 | 0.0017 |
| 343 | 0.002 |
| 344 | 0.0066 |
| 345 | 0.0025 |
| 346 | 0.0018 |
| 347 | 0.12 |
| 348 | 0.15 |
| 349 | 0.22 |
| 350 | 0.19 |
| 351 | 0.15 |
| 352 | 0.19 |
| 353 | 0.14 |
| 354 | 0.33 |
| 355 | 0.35 |
| 356 | 0.28 |
| 357 | 0.31 |
| 358 | 0.0053 |
| 359 | 0.014 |
| 360 | 0.0084 |
| 361 | 0.012 |
| 362 | 0.0022 |
| 363 | 0.0013 |
| 364 | 0.0012 |
| 365 | 0.0013 |
| 366 | 0.0048 |
| 367 | 0.0091 |
| 368 | 0.15 |
| 369 | 0.18 |
| 370 | 0.061 |
| 371 | 0.0055 |
| 372 | 0.02 |
| 373 | 0.087 |
| 374 | 0.14 |
| 375 | 0.24 |
| 376 | 0.14 |
| 377 | 0.097 |
| 378 | 0.0062 |
| 379 | 0.012 |
| 380 | 0.074 |
| 381 | 0.079 |
| 382 | 0.23 |
| 383 | 0.018 |
| 384 | 0.0014 |
| 385 | 0.1 |
| 386 | 0.046 |
| 387 | 0.012 |
| 388 | 0.034 |
| 389 | 0.39 |
| 390 | 0.0012 |
| 391 | 0.0015 |
| 392 | ND |
| 393 | 0.0019 |
| 394 | ND |
| 395 | 0.091 |
| 396 | 0.88 |
| 397 | ND |
| 398 | 0.44 |
| 399 | 0.015 |
| 400 | 0.29 |
| 401 | 0.0059 |
| 402 | 0.013 |
| 403 | 0.0045 |
| 404 | 0.031 |
| 405 | 0.0019 |
| 406 | 0.0021 |
| 407 | 0.0059 |
| 408 | 0.0047 |
| 409 | 0.047 |
| 410 | 0.32 |
| 411 | 0.0021 |
| 412 | 0.0021 |
| 413 | 0.0017 |
| 414 | 0.0027 |
| 415 | 0.0044 |
| 416 | 0.0012 |
| 417 | 0.0014 |
| 418 | 0.0012 |
| 419 | 0.003 |
| 420 | 0.0023 |
| 421 | 0.0012 |
| 422 | 0.0018 |
| 423 | 0.0011 |
| 424 | 0.0026 |
| 425 | 0.0017 |
| 426 | 0.0016 |
| 427 | 0.0039 |
| 428 | 0.0035 |
| 429 | 0.0017 |
| 430 | 0.0026 |
| 431 | 0.0023 |
| 432 | 0.0036 |
| 433 | 0.0036 |
| 434 | 0.0031 |
| 435 | 0.0022 |
| 436 | 0.0015 |
| 437 | 0.0012 |
| 438 | 0.0034 |
| 439 | 0.0025 |
| 440 | 0.002 |
| 441 | 0.0027 |
| 442 | 0.0029 |
| 443 | 0.0021 |
| 444 | 0.0029 |
| 445 | 0.0017 |
| 446 | 0.0024 |
| 447 | 0.002 |
| 448 | 0.002 |
| 449 | 0.0018 |
| 450 | 0.0017 |
| 451 | 0.0015 |
| 452 | 0.0022 |
| 453 | 0.0023 |
| 454 | 0.0021 |
| 455 | 0.0021 |
| 456 | 0.0015 |
| 457 | 0.0013 |
| 458 | 0.0026 |
| 459 | 0.0018 |
| 460 | 0.0018 |
| 461 | 0.0014 |
| 462 | 0.0013 |
| 463 | 0.009 |
| 464 | 0.03 |
| 465 | 0.017 |
| 466 | 0.0018 |
| 467 | 0.0012 |
| 468 | 0.025 |
| 469 | 0.0021 |
| 470 | 0.0012 |
| 471 | 0.00069 |
| 472 | 0.0016 |
| 473 | 0.012 |
| 474 | 0.0014 |
| 475 | 1.54 |
| 476 | >2.59 |
| 477 | 0.0061 |
| 478 | 0.0023 |
| 479 | 0.0034 |
| 480 | 0.0036 |
| 481 | 0.0035 |
| 482 | 0.0039 |
| 483 | 0.0038 |
| 484 | 0.0031 |
| 485 | 0.0036 |
| 486 | 0.0044 |
| 487 | 0.0034 |
| 488 | 0.0057 |
| 489 | 0.0037 |
| 490 | 0.0033 |
| 491 | 0.0083 |
| 492 | 0.0064 |
| 493 | 0.017 |
| 494 | 0.012 |
| 495 | 0.0036 |
| 496 | 0.006 |
| 497 | 0.08 |
| 498 | 0.027 |
| 499 | >1.63 |
| 500 | >1.19 |
| 501 | 0.0046 |
| 502 | 0.0038 |
| 503 | 0.0084 |
| 504 | 0.0086 |
| 505 | 0.0036 |
| 506 | 0.0041 |
| 507 | 0.003 |
| 508 | 0.0029 |
| 509 | 0.032 |
| 510 | >1.22 |
| 511 | >16.61 |
| 512 | >7.35 |
| 513 | 0.0053 |
| 514 | 0.0047 |
| 515 | 0.0038 |
| 516 | 0.05 |
| 517 | 0.051 |
| 518 | 0.018 |
| 519 | 0.0018 |
| 520 | 0.0014 |
| 521 | 0.0014 |
| 522 | 0.0016 |
| 523 | 0.0052 |
| 524 | 0.054 |
| 525 | 0.051 |
| 526 | 0.0061 |
| 527 | 0.0037 |
| 528 | 0.0038 |
| 529 | 0.0033 |
| 530 | 0.0029 |
| 531 | 0.0037 |
| 532 | 0.0009 |
| 533 | 0.0016 |
| 534 | 0.0021 |
| 535 | 0.0022 |
| 536 | 0.0029 |
| 537 | 0.0029 |
| 538 | 0.0035 |
| 539 | 0.003 |
| 540 | 0.0039 |
| 541 | 0.00097 |
| 542 | 0.0019 |
| 543 | 0.002 |
| 544 | 0.002 |
| 545 | 0.00083 |
| 546 | 0.0072 |
| 547 | 0.0046 |
| 548 | 0.0064 |
| 549 | 0.0073 |
| 550 | 0.0055 |
| 551 | 0.0055 |
| 552 | 0.0053 |
| 553 | 0.0045 |
| 554 | 0.003 |
| 555 | 0.0047 |
| 556 | 0.0059 |
| 557 | >16.61 |
| 558 | 0.0041 |
| 559 | 0.0027 |
| 560 | 0.0034 |
| 561 | 0.0023 |
| 562 | 0.0027 |
| 563 | 0.0015 |
| 564 | 0.18 |
| 565 | >16.61 |
| 566 | >3.32 |
| 567 | 0.0031 |
| 568 | 0.39 |
| 569 | 0.0013 |
| 570 | 0.029 |
| 571 | 0.0035 |
| 572 | 0.0058 |
| 573 | 0.65 |
| 574 | 1.39 |

ND = no data

PBMC pSTAT3 assay

[0956] Cryopreserved peripheral blood mononuclear cells (PBMCs) from healthy donors were thawed and washed twice in ImmunoCult-XF T cell expansion medium (XF-TCEM) supplemented with CTL anti-aggregate wash. The cells were counted, resuspended at 2×105 cells per mL XF-TCEM supplemented with penicillin/streptomycin and 100 ng/mL IL-1 (BioLegend, 579404), and cultured in tissue culture flasks coated with anti-CD3 (eBioscience, 16-0037-85 or BD Pharmingen, 555329) at 37° C. in 5% CO2. On day 4 of culture, PBMCs were collected, washed twice in RPMI-1640 supplemented with 0.1% BSA (RPMI-BSA), and incubated in RPMI-BSA in upright tissue culture flasks for 4 hours at 37° C. in 5% CO2. Following this ‘starvation,’ a total of 6×104 cells in 30 pL RPMI-BSA was transferred into each well of a 384-well plate pre-spotted with peptide or DMSO. The cells were incubated for 30 minutes prior to the addition of IL-23 at a final concentration of 5 ng/mL. The cells were stimulated with cytokine for 30 minutes at 37° C. in 5% CO2, transferred onto ice for 10 minutes, and lysed. Cell lysates were stored at −80° C. until phosphorylated STAT3 was measured using the phospho-STAT panel kit (Meso Scale Discovery, K15202D). Results are provided below.

TABLE 4
PBMC pSTAT3 Data

| PBMC pSTAT3 IC50 (nM) | SEQ ID NO: |
|---|---|
| 7.6E−3 | 57 |
| 0.0081 | 62 |
| 0.012 | 68 |
| 0.0057 | 82 |
| 0.0032 | 104 |
| 0.0075 | 105 |
| 0.022 | 145 |
| 0.013 | 164 |
| 0.037 | 181 |
| 0.026 | 217 |
| 0.0075 | 281 |

### Pharmacokinetics Assay

### Exposed Polar Surface Area (EPSA)

### I. Protocol

[0957] Exposed Polar Surface Area (EPSA) is an experimental descriptor of molecular polarity obtained from chromatographic retention in supercritical fluid chromatography (SFC).

[0958] The stationary phase (Chirex 3014(S)-valine and (R)-1-(alpha-naphthyl) ethylamine) was selected for its balance of lipophilic and polar attributes and its capacity to separate compounds with wide polarity differences. The mobile phase consists of methanol (+Ammonium formate) and CO2. Polar compounds are retained stronger under these conditions and a low-slope gradient of methanol achieves elution based on increasing polarity of the mobile phase. Results are normalized using calibration standards generating a linear relationship between retention times and EPSA values. The unit of EPSA is Å².

[0959] Along with the measurement of compounds of interest, a series of 8 calibration standards (see Materials) are analyzed generating a linear relationship between retention times and EPSA value. The 8 compounds used as calibration standard have their own EPSA value defined by G. Goetz based on the comparison with TPSA (see G. Goetz, L. Philippe and M. Shapiro, “EPSA: A novel supercritical fluid chromatography technique enabling the design of permeable cyclic peptides,” ACS Med. Chem. Lett., vol. 5, pp. 1167-1172, 2014 for more information). The slope from the linear relationship between EPSA values of these eight compounds and their retention times is used to determine the EPSA value of each compound of interest that's measured under the same condition using the equation as below:

$$EPSA = {aT}_{R} + b \\ a : slope \\ b : intercept \\ {T}_{R} : retention time of the compound to be analyzed \qquad ( eq1 )$$

[0960] The mixture of calibrations standard is reinjected every 20 compounds to validate the stability of the retention time.

### II. Materials

### Chemicals

[0961] The mobile phase modifier consists of ammonium formate LC_MS grade (>99%) (CAS number 540-69-2) diluted to 20 mM in HPLC grade Methanol (MeOH, CAS number 67-56-1) and liquid C02 SFC grade (CAS number 124-38-9).

### Calibration Standards

[0962] Antipyrine (CAS number: 60-80-0) Chlorpromazine hydrochloride (CAS number: 69-09-0), desipramine hydrochloride (CAS number: 60-80-0), pindolol (CAS Number: 13523-86-9), diclofenac (CAS number: 15307-79-6)), m-nitro benzoic acid (CAS number: 121-92-6), bumetanide (CAS number: 28395-03-1), furosemide (CAS number: 54-31-9) were purchased from Sigma Aldrich (Steihneim, Germany).

### Instrumentation

[0963] All analyses were performed on a ultra performance convergence chromatography (UPC™) apparatus (Waters, Milford, MA, USA) equipped with a sample manager, a binary solvent delivery pump (BSM), a column manager, a convergence manager (automated back pressure regulator), a photo diode array detector (DAD) with a high pressure flow cell, and a mass detector simple quadrupole QDa. After the UV detector, the effluent of the SFC was mixed with an eluent consist of mixture MeOH/water (+0.3% Ammonia) 95/5 delivered by a make up pump with a flow rate of 0.4 mL/min and then split to the QDa using a splitter. The instrument was controlled, and data were processed with Masslynx 4.1.

### III. Methods and Procedures

Chromatographic conditions

[0964] The Analyses were performed using a 4.6×50 mm Chirex 3014(S)-valine and (R)-1-(alpha- naphthyl) ethylamine column (Phenomenex, Le Pecq, France) with 5 um particle and 100A pore size. The flow rate was 4 mL/min with the outlet pressure set to 14 MPa. The injection volume was 2 μL. the mobile phase composition was varied from 5% to 60% modifier at 20%/ min in a linear gradient, holding at 60% for 1.45 min and reverting to the original 5% until the end of the run. Data are acquired during 5 min. An equilibration time of 1 min is applied between 2 injections resulting in an injection every 6 min. each sample is analyzed in duplicate, resulting in a sample to sample turnaround time of 12 min.

[0965] The column temperature was set to 35° C. The mass detector was used in full scan from 100 to 800 for small molecules and from 500 to 1200 for peptides.

### Sample Preparation

[0966] Each sample is delivered by compound logistics from DMSO stock solution without dilution. The concentration is 1 mM and the volume is 60 μL. Results are provided below in Table 5.

TABLE 5
EPSA Data

| | EPSA | | EPSA |
|---|---|---|---|
| SEQ ID | Å² | SEQ ID | Å² |
| 1 | 179.2 | 18 | 218.64 |
| 2 | 184 | 19 | 170.68 |
| 3 | ND | 20 | 168.14 |
| 4 | ND | 21 | 170.27 |
| 5 | 168 | 22 | ND |
| 6 | 170 | 23 | ND |
| 7 | 170.25 | 24 | ND |
| 8 | 169.19 | 25 | ND |
| 9 | 186.57 | 26 | ND |
| 10 | ND | 27 | ND |
| 11 | ND | 28 | ND |
| 12 | ND | 29 | ND |
| 13 | 174.37 | 30 | 166.07 |
| 14 | 166.46 | 31 | 158.19 |
| 15 | 167.61 | 32 | 166.07 |
| 16 | 180.25 | 33 | ND |
| 17 | 186.49 | 34 | ND |
| 35 | 183.94 | 67 | 149.57 |
| 36 | ND | 68 | 148.49 |
| 37 | 174.37 | 69 | 161.12 |
| 38 | 171.73 | 70 | 156.65 |
| 39 | 157.5 | 71 | 146.31 |
| 40 | 156.45 | 72 | 159.64 |
| 41 | ND | 73 | 155.28 |
| 42 | ND | 74 | 154.47 |
| 43 | 172.79 | 75 | 157.19 |
| 44 | ND | 76 | 161.27 |
| 45 | ND | 77 | 161.27 |
| 46 | 161.58 | 78 | 157.19 |
| 47 | 154.45 | 79 | 144.02 |
| 48 | 160.24 | 80 | 157.19 |
| 49 | 164.21 | 81 | 173.1 |
| 50 | 162.27 | 82 | 170.9 |
| 51 | 155.73 | 83 | 167.08 |
| 52 | 158.35 | 84 | 165.97 |
| 53 | 154.86 | 85 | 150.94 |
| 54 | 155.73 | 86 | 150.38 |
| 55 | 158.79 | 87 | 159.29 |
| 56 | 157.91 | 88 | 157.62 |
| 57 | 165.68 | 89 | 159.84 |
| 58 | 153.55 | 90 | 164.41 |
| 59 | 166.13 | 91 | 145.32 |
| 60 | 157.48 | 92 | 151.44 |
| 61 | 159.22 | 93 | 150.66 |
| 62 | 159.66 | 94 | 141.79 |
| 63 | 156.6 | 95 | 131.48 |
| 64 | 159.66 | 96 | 138.7 |
| 65 | 153.99 | 97 | 152.32 |
| 66 | 138.15 | 98 | 139.17 |
| 99 | 164.31 | 131 | 181.72 |
| 100 | 139.21 | 132 | 162.77 |
| 101 | 144.77 | 133 | 151.2 |
| 102 | 155.87 | 134 | 158.67 |
| 103 | 157.54 | 135 | 171.46 |
| 104 | 149.76 | 136 | 169.08 |
| 105 | 155.32 | 137 | 159.9 |
| 106 | 153.1 | 138 | 158.69 |
| 107 | 172.53 | 139 | 150.04 |
| 108 | 173.08 | 140 | 148.3 |
| 109 | 171.42 | 141 | 139.7 |
| 110 | 170.86 | 142 | 166.39 |
| 111 | 152.54 | 143 | 160.85 |
| 112 | 169.2 | 144 | 160.85 |
| 113 | 168.93 | 145 | 157.79 |
| 114 | 172.88 | 146 | 151.73 |
| 115 | 171.09 | 147 | 155.9 |
| 116 | 169.51 | 148 | 153.15 |
| 117 | 139.35 | 149 | 157.43 |
| 118 | 137.77 | 150 | 158.85 |
| 119 | 159.3 | 151 | 182.16 |
| 120 | 153.09 | 152 | 155.29 |
| 121 | 145.46 | 153 | 170.71 |
| 122 | 140.83 | 154 | 143.9 |
| 123 | 156.09 | 155 | 150.02 |
| 124 | 158.35 | 156 | 154.54 |
| 125 | 181.3 | 157 | 149.27 |
| 126 | 183.67 | 158 | 160.34 |
| 127 | 178.77 | 159 | 149.43 |
| 128 | 174.51 | 160 | 151.21 |
| 129 | 165.09 | 161 | 175.05 |
| 130 | 164.24 | 162 | 162.6 |
| 163 | 167.7 | 195 | 146.63 |
| 164 | 144.54 | 196 | 149.05 |
| 165 | 151.37 | 197 | 136.79 |
| 166 | 178.67 | 198 | 144 |
| 167 | 157.24 | 199 | 140.82 |
| 168 | 154.26 | 200 | 144.93 |
| 169 | 153.78 | 201 | 145.2 |
| 170 | 145.98 | 202 | 145.69 |
| 171 | 152.42 | 203 | 135.46 |
| 172 | 144.57 | 204 | 152.51 |
| 173 | 144.3 | 205 | 148.54 |
| 174 | 158.02 | 206 | 144.51 |
| 175 | 140.17 | 207 | 139.38 |
| 176 | 168.08 | 208 | 141.12 |
| 177 | 148.55 | 209 | 138.98 |
| 178 | 154.36 | 210 | 144.81 |
| 179 | 147.3 | 21 | 151.8 |
| 180 | 150.1 | 212 | 138.51 |
| 181 | 136.18 | 213 | 154.42 |
| 182 | 152.68 | 214 | 151.32 |
| 183 | 132.92 | 215 | 144.6 |
| 184 | 141.61 | 216 | 141.4 |
| 185 | 155.44 | 217 | 138.09 |
| 186 | 147.88 | 218 | 136.46 |
| 187 | 137.31 | 219 | 139.14 |
| 188 | 146.8 | 220 | 142.4 |
| 189 | 144.34 | 221 | 134.2 |
| 190 | 136.64 | 222 | 142.87 |
| 191 | 143.97 | 223 | 140.66 |
| 192 | 148.89 | 224 | 138.88 |
| 193 | 134.97 | 225 | 136.15 |
| 194 | 146.09 | 226 | 141.61 |
| 227 | 139.24 | 259 | 148.99 |
| 228 | 139.19 | 260 | 147.41 |
| 229 | 145.23 | 26 | 147.98 |
| 230 | 141.56 | 262 | 144.75 |
| 231 | 146.63 | 263 | 139.95 |
| 232 | 140.07 | 264 | 150.97 |
| 233 | 140.57 | 265 | 158.91 |
| 234 | 140.51 | 266 | 157.49 |
| 235 | 149.11 | 267 | ND |
| 236 | 158.53 | 268 | 147.97 |
| 237 | 140.29 | 269 | 167.1 |
| 238 | 145.03 | 270 | ND |
| 239 | 138.47 | 271 | 159.03 |
| 240 | 143.71 | 272 | 146.28 |
| 241 | 134.84 | 273 | 157.24 |
| 242 | 144.75 | 274 | 153.32 |
| 243 | 141.56 | 275 | 149.4 |
| 244 | 137.65 | 276 | ND |
| 245 | 148.01 | 277 | 153.84 |
| 246 | 150.87 | 278 | 177.76 |
| 247 | 144.7 | 279 | 163.04 |
| 248 | 145.58 | 280 | 167.45 |
| 249 | 147.12 | 281 | 157.66 |
| 250 | 145.58 | 282 | 163.09 |
| 251 | 147.79 | 283 | 146.05 |
| 252 | 147.67 | 284 | 150.78 |
| 253 | 145.75 | 285 | 147.73 |
| 254 | 143.54 | 286 | 148.94 |
| 255 | 140.84 | 287 | ND |
| 256 | 141.94 | 288 | 144.38 |
| 257 | 157.08 | 289 | 142.36 |
| 258 | 151.09 | 290 | 137.35 |
| 291 | 136.71 | 323 | ND |
| 292 | 151.88 | 324 | ND |
| 293 | 149.22 | 325 | ND |
| 294 | 157.01 | 326 | 156.77 |
| 295 | 149.85 | 327 | 156.65 |
| 296 | ND | 328 | 159.08 |
| 297 | 152.93 | 329 | 155.2 |
| 298 | 149.43 | 330 | 153.68 |
| 299 | 157.14 | 331 | 152.9 |
| 300 | 153.44 | 332 | 157.74 |
| 301 | 153.2 | 333 | 158.53 |
| 302 | 155.02 | 334 | 154.84 |
| 303 | 152.11 | 335 | 152.77 |
| 304 | 164.23 | 336 | 155.68 |
| 305 | 152.65 | 337 | 151.68 |
| 306 | 152.77 | 338 | ND |
| 307 | ND | 339 | 154.59 |
| 308 | 154.17 | 340 | 155.02 |
| 309 | 157.5 | 341 | 152.77 |
| 310 | 152.35 | 342 | 161.75 |
| 311 | 156.23 | 343 | 156.47 |
| 312 | 151.08 | 344 | 157.74 |
| 313 | ND | 345 | 161.93 |
| 314 | ND | 346 | 157.68 |
| 315 | ND | 347 | 186.53 |
| 316 | 153.62 | 348 | 184.27 |
| 317 | 157.99 | 349 | 178.87 |
| 318 | 150.83 | 350 | ND |
| 319 | 150.96 | 351 | 184.06 |
| 320 | 161.57 | 352 | 178.87 |
| 321 | 152.83 | 353 | ND |
| 322 | ND | 354 | 194.35 |
| 355 | 186 | 387 | ND |
| 356 | 173.56 | 388 | 161.08 |
| 357 | 180.66 | 389 | 185.39 |
| 358 | 141.77 | 390 | 147.59 |
| 359 | 146.57 | 391 | 158.02 |
| 360 | 166.39 | 392 | ND |
| 361 | 168.49 | 393 | 144.09 |
| 362 | 156.88 | 394 | ND |
| 363 | 155.02 | 395 | 189.15 |
| 364 | 156.34 | 396 | 171.59 |
| 365 | 150.35 | 397 | ND |
| 366 | 161.66 | 398 | 167.78 |
| 367 | 161.72 | 399 | 157.12 |
| 368 | 166.1 | 400 | 172.62 |
| 369 | 183.72 | 401 | 155.02 |
| 370 | 186.97 | 402 | 156.32 |
| 371 | 181.81 | 403 | ND |
| 372 | 203.32 | 404 | 195.62 |
| 373 | ND | 405 | 157.04 |
| 374 | 170.21 | 406 | 149.57 |
| 375 | 171.72 | 407 | 151.45 |
| 376 | 176.07 | 408 | 165.31 |
| 377 | 148.25 | 409 | 197.81 |
| 378 | 149.15 | 410 | ND |
| 379 | 149.74 | 411 | 155.37 |
| 380 | 170.86 | 412 | 156.86 |
| 381 | 171.07 | 413 | 153.88 |
| 382 | 176.03 | 414 | 156.56 |
| 383 | ND | 415 | 147.97 |
| 384 | 156.76 | 416 | 166.44 |
| 385 | ND | 417 | 166.56 |
| 386 | ND | 418 | 166.5 |
| 419 | 155.68 | 451 | 171.93 |
| 420 | 170.15 | 452 | 163.23 |
| 421 | 167.63 | 453 | 173.31 |
| 422 | 192.5 | 454 | 175.89 |
| 423 | 160.53 | 455 | 158.19 |
| 424 | 164.85 | 456 | 156.45 |
| 425 | 160.71 | 457 | 163.17 |
| 426 | 163.05 | 458 | 171.51 |
| 427 | 167.73 | 459 | 178.23 |
| 428 | 160.59 | 460 | 166.65 |
| 429 | 191.54 | 461 | 192.25 |
| 430 | 166.83 | 462 | ND |
| 431 | 174.03 | 463 | 150.69 |
| 432 | 167.19 | 464 | 160.46 |
| 433 | 163.53 | 465 | 175.8 |
| 434 | 155.97 | 466 | 153.42 |
| 435 | 181.7 | 467 | 153.6 |
| 436 | 149.44 | 468 | 151.42 |
| 437 | 185.54 | 469 | 156.04 |
| 438 | 167.49 | 470 | 159.61 |
| 439 | 166.59 | 471 | 174.1 |
| 440 | 162.69 | 472 | ND |
| 441 | 175.65 | 473 | 201.93 |
| 442 | 169.17 | 474 | 185.44 |
| 443 | 191.48 | 475 | 153.1 |
| 444 | 174.09 | 476 | 154.87 |
| 445 | 175.65 | 477 | 165.99 |
| 446 | 172.65 | 478 | 163.79 |
| 447 | 170.73 | 479 | 157.51 |
| 448 | 175.53 | 480 | 197.79 |
| 449 | 175.71 | 48 | 183.86 |
| 450 | 164.85 | 482 | 180.35 |
| 483 | 165.46 | 515 | 197.29 |
| 484 | 163.28 | 516 | 236.66 |
| 485 | 163.28 | 517 | 240.66 |
| 486 | 164.13 | 518 | 229.77 |
| 487 | 164.43 | 519 | 186.31 |
| 488 | 164.55 | 520 | ND |
| 489 | 163.71 | 521 | ND |
| 490 | 182.11 | 522 | 175.57 |
| 491 | 168.13 | 523 | 154.05 |
| 492 | 164.55 | 524 | 198.42 |
| 493 | 132.09 | 525 | 195 |
| 494 | 132.79 | 526 | 184.45 |
| 495 | 160.2 | 527 | 188.74 |
| 496 | 161.47 | 528 | 162.7 |
| 497 | 161.71 | 529 | 161 |
| 498 | 161.66 | 530 | 166.18 |
| 499 | 133.49 | 531 | 165.96 |
| 500 | 159.17 | 532 | 171.46 |
| 501 | 174.72 | 533 | 170.43 |
| 502 | 168.79 | 534 | 171.76 |
| 503 | 169.34 | 535 | 189.92 |
| 504 | 178.11 | 536 | 210.36 |
| 505 | 178.96 | 537 | 163.06 |
| 506 | 190.82 | 538 | 163.06 |
| 507 | 163.59 | 539 | ND |
| 508 | 197.17 | 540 | 182.65 |
| 509 | 160.98 | 541 | 186.77 |
| 510 | 201.18 | 542 | 179.56 |
| 511 | 197.55 | 543 | 178.52 |
| 512 | 204.76 | 544 | 157.08 |
| 513 | 223.62 | 545 | 153.73 |
| 514 | 248.45 | 546 | 167.79 |
| 547 | 167.55 | | |
| 548 | ND | | |
| 553 | 184.93 | | |
| 554 | 171.4 | | |
| 555 | 170.67 | | |
| 556 | 162.87 | | |
| 557 | 138.57 | | |
| 558 | 173.74 | | |
| 559 | 154.7 | | |
| 560 | 153.66 | | |
| 561 | 162.68 | | |
| 562 | 165.55 | | |
| 563 | 193.71 | | |
| 564 | 152.69 | | |
| 565 | 143.6 | | |
| 566 | 136.63 | | |
| 567 | 171.63 | | |
| 568 | 173.73 | | |
| 569 | 172.95 | | |
| 570 | 154.38 | | |
| 571 | ND | | |
| 572 | 165.67 | | |
| 573 | 153.15 | | |
| 574 | ND | | |

ND: Not determined

[0967] Although the foregoing invention has been described in some detail by way of illustration and Example for purposes of clarity of understanding, one of skill in the art will appreciate that certain changes and modifications may be practiced upon review of the specification and within the scope of the appended claims. The full scope of the invention should be determined by reference to the claims, along with their full scope of equivalents, and the specification, along with such variations. In addition, each reference provided herein is incorporated by reference in its entirety to the same extent as if each reference was individually incorporated by reference. Where a conflict exists between the instant application and a reference provided herein, the instant application shall dominate.

### Aspects of the Present Invention

[0968] The following aspects illustrate and are not intended to limit scope of the present invention. Instead, these aspects provide guidance to any skilled artisan on how to prepare and use compounds, compositions and methods taught by the present invention, where such skilled artisans will appreciate that modifications may be made without departing from the spirit and scope of the invention.

[0969] In one aspect of the invention:

[0970] 1. A compound of Formula (I):

[chemical structure]

wherein:

[chemical structure]

wherein:
[0971] R⁵ is —OCHF₂, —O(CH₂)₉CO₂H,

[chemical structure]

[chemical structure]

wherein:
[0972] R^{h} is H, —CH₃, —C(O)CH₃, —C(NH)NH₂, —(CH₂)₃O(CH₂)₂OCH₃, —CH₂CH₂OCH₃, —(CH₂CH₂O)₃CH₃, —(CH₂CH₂O)₆CH₃,

[chemical structure]

[0973] Rⁱ is H, —CH₃, —(CH₂)₃O(CH₂)₂OCH₃,

[chemical structure]

[0974] p is 1, 2 or 3;

[chemical structure]

[0975] q is 1, 2, 3, 4, or 5;
[0976] R^{k} is —OCH₃,

[chemical structure]

[0977] r is 3, 4, 5, 6, or 8;
[0978] wherein:
   [0979] R^{jj} is H, —(CH₂)₇CH₃, —(CH₂)₁₅CH₃, —(CH₂)₂OCH₃, or —(CH₂CH₂O)₃CH₃;
[0980] R¹ is —C(O)C(1-2)alkyl, —C(O)CF₃, —COCH₂CF₃, —CO(CH₂)₅N(CH₃)₃⁺AN⁻, —CH₂CH₂NHC(O)CH₂O(CH₂CH₂O)₂CH₃, —CH₂CH₂NHC(O)(CH₂CH₂O)₆CH₃,

[chemical structure]

wherein:
[0981] R^{a} is

[chemical structure]

CH₂CH₂OCH₂CH₂N(CH₃)₂,
[0982] —(CH₂CH₂O)₃CH₂CH₂N(CH₃)₂, —(CH₂CH₂O)₃CH₂CH₂N(CH₃)₃ ⁺AN⁻, —(CH₂CH₂O)₅CH₂CH₂NC(O)CH₃, —(CH₂CH₂O)₈CH₂CH₂NC(O)CH₃, or —(CH₂CH₂O)₁₁CH₂CH₂NC(O)CH₃;
[0983] X3 is a direct bond, (D) arginine, (D) lysine substituted with R^{b},

[chemical structure]

wherein:

[chemical structure]

R² is H, —CH(CH₃)₂,

[chemical structure]

wherein:
[0984] R^{c} is H, or —CH₃
[0985] R^{c}′ is H, or —CH₃

[chemical structure]

[0986] R³ is H, —CH₃, —CF₃, or

[chemical structure]

[0987] R⁴ is H, or —CH₃;
[0988] X8 is

[chemical structure]

[0989] wherein:
   [0990] R^{e} is H, or —CH₃;
   [0991] R^{ee} is H;
   [0992] R^{f} is H, —CH₃, —C(CH₃)₃, —C(O)CH₃, —C(O)(CH₂CH₂O)₆CH₃, —(CH₂CH₂O)₆CH₃,

[chemical structure]

[0993] R^{g} is H, —OH, —C(O)NH₂, or —CH₂NHC(O)CH₃;
[0994] n is, or 1
[0995] X12 is absent,

[chemical structure]

[0996] R⁶ is —CH₃, —CH₂CH₂C(O)R^{m}, —(CH₂)ₛNRⁿR^{o},

[chemical structure]

[0997] R⁷ is H, or —CH₃;
   [0998] wherein:
[0999] R^{m} is —OH, or

[chemical structure]

[1000] Rⁿ is H, —CH₃, —CH₂CH(CH₃)₂, —C(O)CH₃, —C(O)(CH₂CH₂O)₆CH₃, —(CH₂CH₂O)₆CH₃, —C(O)(CH₂CH₂O)ₜCH₂CH₂R^{p},

[chemical structure]

[1001] R^{o} is H, —CH₃, or —C(O)CH₃;
   [1002] wherein:
      R^{p} is NHC(O)CH₃, or

[chemical structure]

[1003] s is 1, 2, or 4;
[1004] t is 2, 6, 9, or 12;
[1005] u is 2 or 3;
[1006] v is 10 or 12;
[1007] R⁸ is —CH₂CH₂CH₂NHC(O)CH₃, —C(O)NH₂, or —C(O)NHCH₃;
[1008] X15 is absent,

[chemical structure]

[chemical structure]

[1009] X16 is absent,

[chemical structure]

[1010] wherein:
   [1011] R^{q} is 0

[chemical structure]

[1012] R^{r} is H;
[1013] w is24, or 5;
[1014] x is 2 or 4; and
   R⁹ is —NH₂, —NHCH₃, —N(CH₃)₂, —NH(CH₂CH₂O)₂CH₃, —N(CH₃)(CH₂CH₂O)₂CH₃, —NH(CH₂CH₂O)_{y}R^{s},

[chemical structure]

[1015] wherein:
   [1016] y is 2, 4, or 6;
   [1017] R^{s} is —CH₃, or

[chemical structure]

wherein:
[1018] AN⁻as above defined for A, R, X3, X12, R1, R2, R5, R6, R8, R15, R16 and R^{a}, R^{b}, R^{d}, R^{f}, R^{h}, Rⁱ, R^{j}, R^{k}, R^{m}, Rⁿ, R^{o}, R^{s} is acetate, adipate, benzoate, benzenesulfonate, citrate, decanoate, chloride, lactate, maleate, methanesulfonate, oxalate, pivalate, propionate, succinate, sulfate, tartrate, or trifluoroacetate; or a pharmaceutically acceptable salt thereof.

[1019] In another aspect of the invention:

[1020] 2. A compound of Formula (II)

[chemical structure]

[1021] wherein
[1022] X12 is absent,

[chemical structure]

or a pharmaceutically acceptable salt thereof.

[1023] In another aspect of the invention:

[1024] 3. The compound of aspect 2, wherein:
[1025] wherein:
[1026] A is

[chemical structure]

[1027] wherein:
   [1028] R⁵ is —OCHF₂, —O(CH₂)₉CO₂H,

[chemical structure]

[chemical structure]

[1029] wherein:
   [1030] R^{h} is H, —CH₃, —C(O)CH₃, —C(NH)NH₂, —(CH₂)₃₀(CH₂)₂₀CH₃, —CH₂CH₂OCH₃, —(CH₂CH₂O)₃CH₃, —(CH₂CH₂O)₆CH₃,

[chemical structure]

[1031] Rⁱ is H —CH₃, —(CH₂)₃O(CH₂)₂OCH₃,

[chemical structure]

[1032] p is 1, 2 or 3;
[1033] R^{j} is

[chemical structure]

[1034] q is 1, 2, 3, 4, or 5;
[1035] R^{k} is —OCH₃,

[chemical structure]

[1036] r is 3, 4, 5, 6, or 8;
[1037] wherein:
   [1038] R^{jj} is H, —(CH₂)₇CH₃, —(CH₂)₁₅CH₃, —(CH₂)₂OCH₃, or —(CH₂CH₂O)₃CH₃; R¹ is —C(O)C(1-2)alkyl, —C(O)CF₃, —COCH₂CF₃, —CO(CH₂)₅N(CH₃)₃⁺Cl⁻, —CH₂CH₂NHC(O)CH₂O(CH₂CH₂O)₂CH₃, —CH₂CH₂NHC(O)(CH₂CH₂O)₆CH₃,

[chemical structure]

[1039] wherein:
   [1040] R^{a} is

[chemical structure]

CH₂CH₂OCH₂CH₂N(CH₃)₂, —(CH₂CH₂O)₃CH₂CH₂N(CH₃)₂, —(CH₂CH₂O)₃CH₂CH₂N(CH₃)₃Cl⁻, —(CH₂CH₂O)₅CH₂CH₂NC(O)CH₃, —(CH₂CH₂O)₈CH₂CH₂NC(O)CH₃, or —(CH₂CH₂O)₁₁CH₂CH₂NC(O)CH₃;
X3 is a direct bond, (D) arginine, (D) lysine substituted with R^{b},

[chemical structure]

[1041] wherein:
[1042] R^{b} is

[chemical structure]

R² is H, —CH(CH₃)₂,

[chemical structure]

wherein
[1043] R^{c} is H, or —CH₃;
[1044] R^{c}′ is H, or —CH₃;

[chemical structure]

[1045] R³ is H, —CH₃, —CF₃, or

[chemical structure]

[1046] R⁴ is H, or —CH₃;
[1047] X8 is

[chemical structure]

[1048] wherein:
   [1049] R^{e} is H, or —CH₃;
   [1050] R^{ee} is H;
   [1051] R^{f} is H, —CH₃, —C(CH₃)₃, —C(O)CH₃, —C(O)(CH₂CH₂O)₆CH₃, —(CH₂CH₂O)₆CH₃,

[chemical structure]

[1052] R^{g} is H, —OH, —C(O)NH₂, or —CH₂NHC(O)CH₃;
[1053] n is 0, or 1;
[1054] X12 is absent,

[chemical structure]

[1055] R⁶ is —CH₃, —CH₂CH₂C(O)R^{m}, —(CH₂)ₛNRⁿR^{o},

[chemical structure]

[1056] R⁷ is H, or —CH₃;
[1057] wherein:
   [1058] R^{m} is —OH, or

[chemical structure]

[1059] Rⁿ is H, —CH₃, —CH₂CH(CH₃)₂, —C(O)CH₃, —C(O)(CH₂CH₂O)₆CH₃, —(CH₂CH₂O)₆CH₃, —C(O)(CH₂CH₂O)ₜCH₂CH₂R^{p},

[chemical structure]

[1060] R^{o} is H, —CH₃, or —C(O)CH₃;
   [1061] wherein:
      [1062] R^{p} is NHC(O)CH₃, or N

[chemical structure]

[1063] s is 1, 2, or 4;
[1064] t is 2, 6, 9, or 12;
[1065] u is 2 or 3;
[1066] v is 10 or 12;
[1067] R⁸ is —CH₂CH₂CH₂NHC(O)CH₃, —C(O)NH₂, or —C(O)NHCH₃;
[1068] X15 is absent,

[chemical structure]

[chemical structure]

[1069] X16 is absent,

[chemical structure]

[1070] wherein:
   [1071] R^{q} is

[chemical structure]

[1072] R^{r} is H;
[1073] w is 2 4, or 5;
[1074] x is 2 or 4; and
[1075] R⁹ is —NH₂, —NHCH₃, —N(CH₃)₂, —NH(CH₂CH₂O)₂CH₃, —N(CH₃)(CH₂CH₂O)₂CH₃, —NH(CH₂CH₂O)_{y}R^{s},

[chemical structure]

[1076] wherein:
   [1077] y is 2, 4, or 6;
[1078] R^{s} is —CH₃, or

[chemical structure]

or a pharmaceutically acceptable salt thereof.

[1079] In another aspect of the invention:

[1080] 4. The compound of any of aspects 1 to 3 wherein
[1081] R² is

[chemical structure]

[1082] wherein:
   [1083] R^{c} is —CH₃;
   [1084] R^{c}′ is —CH₃;
   [1085] R^{d} is

[chemical structure]

wherein:
[1086] AN⁻as above defined for A, R, X3, X12, R1, R2, R5, R6, R8, R15, R16 and R^{a}, R^{b}, R^{d}, R^{f}, R^{h}, Rⁱ, R^{j}, R^{k}, R^{m}, Rⁿ, R^{o}, R^{s} is acetate, adipate, benzoate, benzenesulfonate, citrate, decanoate, chloride, lactate, maleate, methanesulfonate, oxalate, pivalate, propionate, succinate, sulfate, tartrate, or trifluoroacetate; or a pharmaceutically acceptable salt thereof.

[1087] In another aspect of the invention:

[1088] 5. A compound according to Formula (III) PGP-524 C1

[chemical structure]

[1089] wherein:
[1090] A is

[chemical structure]

[1091] wherein:
   [1092] R⁵ is —OCHF₂, —O(CH₂)₉CO₂H,

[chemical structure]

[chemical structure]

[1093] wherein:
[1094] R^{h} is H, —CH₃, —C(O)CH₃, —C(NH)NH₂, —(CH₂)₃O(CH₂)₂OCH₃, —CH₂CH₂OCH₃, —(CH₂CH₂O)₃CH₃, —(CH₂CH₂O)₆CH₃,

[chemical structure]

[1095] Rⁱ is H, —CH₃, —(CH₂)₃O(CH₂)₂OCH₃,

[chemical structure]

[1096] p is 1, 2 or 3;
[1097] R^{j} is

[chemical structure]

[1098] q is 1, 2, 3, 4, or 5;
[1099] R^{k} is —OCH₃

[chemical structure]

[1100] r is 3, 4, 5, 6, or 8;
[1101] wherein:
   [1102] R^{jj} is H, —(CH₂)₇CH₃, —(CH₂)₁₅CH₃, —(CH₂)₂OCH₃, or —(CH₂CH₂O)₃CH₃;
      R¹ is —C(O)C₍₁₋₂₎alkyl, —C(O)CF₃, —COCH₂CF₃, —CO(CH₂)₅N(CH₃)₃⁺AN⁻, —CH₂CH₂NHC(O)CH₂O(CH₂CH₂O)₂CH₃, —CH₂CH₂NHC(O)(CH₂CH₂O)₆CH₃,

[chemical structure]

[1103] wherein:
   [1104] R^{a} is

[chemical structure]

[1105] CH₂CH₂OCH₂CH₂N(CH₃)₂, —(CH₂CH₂O)₃CH₂CH₂N(CH₃)₂, —(CH₂CH₂O)₃CH₂CH₂N(CH₃)₃ ⁺AN⁻, —(CH₂CH₂O)₅CH₂CH₂NC(O)CH₃, —(CH₂CH₂O)₈CH₂CH₂NC(O)CH₃, or —(CH₂CH₂O)₁₁CH₂CH₂NC(O)CH₃;
[1106] X3 is a direct bond, (D) arginine, (D) lysine substituted with R^{b},

[chemical structure]

[1107] wherein:
   [1108] R^{b} is

[chemical structure]

[1109] R³ is H, —CH₃, —CF₃, or

[chemical structure]

[1110] R⁴ is H, or —CH₃
[1111] X8 is

[chemical structure]

[1112] wherein:
   [1113] R^{e} is H, or —CH₃;
   [1114] R^{ee} is H;
   [1115] R^{f} is H, —CH₃, —C(CH₃)₃, —C(O)CH₃, —C(O)(CH₂CH₂O)₆CH₃, —(CH₂CH₂O)₆CH₃

[chemical structure]

[1116] R^{g} is H, —OH, —C(O)NH₂, or —CH₂NHC(O)CH₃;
[1117] n is 0, or 1;
[1118] X12 is absent,

[chemical structure]

[1119] R⁶ is —CH₃, —CH₂CH₂C(O)R^{m}, —(CH₂)ₛNRⁿR^{o},

[chemical structure]

[1120] R⁷ is H, or —CH₃;
[1121] wherein:
   [1122] R^{m} is —OH, or

[chemical structure]

[1123] Rⁿ is H, —CH₃, —CH₂CH(CH₃)₂, —C(O)CH₃, —C(O)(CH₂CH₂O)₆CH₃, —(CH₂CH₂O)₆CH₃, —C(O)(CH₂CH₂O)ₜCH₂CH₂R^{p},

[chemical structure]

[1124] R^{o} is H, —CH₃, or —C(O)CH₃;
   [1125] wherein:
      [1126] R^{p} is NHC(O)CH₃, or

[chemical structure]

[1127] s is 1, 2, or 4;
[1128] t is 2, 6, 9, or 12;
[1129] u is 2 or 3;
[1130] v is 10 or 12;
[1131] R⁸ is —CH₂CH₂CH₂NHC(O)CH₃, —C(O)NH₂, or —C(O)NHCH₃;
[1132] X15 is absent,

[chemical structure]

[chemical structure]

[1133] X16 is absent,

[chemical structure]

[1134] wherein:
   [1135] R^{q} is

[chemical structure]

[1136] R^{r} is H;
[1137] w is 2 4, or 5;
[1138] x is 2 or 4; and
[1139] R⁹ is —NH₂, —NHCH₃, —N(CH₃)₂, —NH(CH₂CH₂O)₂CH₃, —N(CH₃)(CH₂CH₂O)₂CH₃, —NH(CH₂CH₂O)_{y}R^{S},

[chemical structure]

[1140] wherein:
   [1141] y is 2, 4, or 6;
   [1142] R^{s} is —CH₃, or

[chemical structure]

wherein:
[1143] AN⁻as above defined for A, R, X3, X12, R1, R2, R5, R6, R8, R15, R16 and R^{a}, R^{b}, R^{d}, R^{f}, R^{h}, Rⁱ, R^{j}, R^{k}, R^{m}, Rⁿ, R^{o}, R^{s} is acetate, adipate, benzoate, benzenesulfonate, citrate, decanoate, chloride, lactate, maleate, methanesulfonate, oxalate, pivalate, propionate, succinate, sulfate, tartrate, or trifluoroacetate; or
[1144] a pharmaceutically acceptable salt thereof.

[1145] In another aspect of the invention:

[1146] 6. The compound of aspect 5 wherein
[1147] A is

[chemical structure]

[1148] wherein:
   [1149] AN⁻as above defined for A, R, X3, X12, R1, R2, R5, R6, R8, R15, R16 and R^{a}, R^{b}, R^{d}, R^{f}, R^{h}, Rⁱ, R^{j}, R^{k}, R^{m}, Rⁿ, R^{o}, R^{s} is acetate, adipate, benzoate, benzenesulfonate, citrate, decanoate, chloride, lactate, maleate, methanesulfonate, oxalate, pivalate, propionate, succinate, sulfate, tartrate, or trifluoroacetate; or
[1150] a pharmaceutically acceptable salt thereof.

[1151] In another aspect of the invention:

[1152] 7. The compound of aspect 5 wherein
[1153] A is

[chemical structure]

[1154] wherein:
   [1155] AN⁻as above defined for A, R, X3, X12, R1, R2, R5, R6, R8, R15, R16 and R^{a}, R^{h}, R^{d}, R^{f}, R^{h}, Rⁱ, R^{j}, R^{k}, R^{m}, Rⁿ, R^{o}, R^{s} is acetate, adipate, benzoate, benzenesulfonate, citrate, decanoate, chloride, lactate, maleate, methanesulfonate, oxalate, pivalate, propionate, succinate, sulfate, tartrate, or trifluoroacetate; or
[1156] a pharmaceutically acceptable salt thereof.

[1157] In another aspect of the invention:

[1158] 8. The compound of aspect 7 wherein
[1159] X8 is

[chemical structure]

[1160] wherein:
   [1161] AN⁻as above defined for A, R, X3, X12, R1, R2, R5, R6, R8, R15, R16 and R^{a}, R^{h}, R^{d}, R^{f}, R^{h}, Rⁱ, R^{j}, R^{k}, R^{m}, Rⁿ, R^{o}, R^{s} is acetate, adipate, benzoate, benzenesulfonate, citrate, decanoate, chloride, lactate, maleate, methanesulfonate, oxalate, pivalate, propionate, succinate, sulfate, tartrate, or trifluoroacetate; or
[1162] a pharmaceutically acceptable salt thereof.

[1163] In another aspect of the invention:

[1164] 9. The compound of aspect 5 selected from
[1165] cPEG3aCO-Pen(3)—N(N(Me)2)-T-7MeW—K(NMeAc)-Pen(3)-TMAPF-2Nal-THP-K(NMeAc)—N-3Pya-Sar-CO(NHPEG3a);
[1166] MeCO-Pen(3)—N(N(Me)2)-T-7MeW—K(NMeAc)-Pen(3)-TMAPF-2Nal-THP-K(NMeAc)—N-3Pya-Sar-CO(NHPEG3a);
[1167] cPEG3aCO-Pen(3)—N(N(Me)2)-T-7MeW—K(NMeAc)-Pen(3)-APEG3F-2Nal-THP-A-N-3Pya-Sar-CON(Me)2;
[1168] cPEG3aCO-Pen(3)—N(N(Me)2)-T-7MeW—K(NMeAc)-Pen(3)-TMAPF-2Nal-THP-A-N-3Pya-Sar-CON(Me)2;
[1169] MeCO-Pen(3)—N(N(Me)2)-T-7MeW-Dab(NMeAc)-Pen(3)-AEF-2Nal-THP-AIB-N-3Pya-Sar-CON(Me)2;
[1170] cPEG3aCO-Pen(3)—N(N(Me)2)-T-7MeW-AIB-Pen(3)-AEF-2Nal-THP-AIB-N-3Pya-Sar-CON(Me)2;
[1171] MeCO-Pen(3)—N(N(Me)2)-T-7MeW—K(NMeAc)-Pen(3)-TMAPF-2Nal-THP-APEG2Ser-N-3Pya-Sar-CON(Me)2;
[1172] MeCO-Pen(3)—N(N(Me)2)-T-7MeW-APEG2Ser(S*)-Pen(3)-APEG3F-2Nal-THP-APEG2Ser(S*)—N-3Pya-Sar-CON(Me)2;
[1173] MeCO-Pen(3)—N(N(Me)2)-T-7MeW-APEG2Ser(R*)-Pen(3)-APEG3F-2Nal-THP-APEG2Ser(S*)—N-3Pya-Sar-CON(Me)2;
[1174] MeCO-Pen(3)—N(N(Me)2)-T-7MeW—K(NMeAc)-Pen(3)-APEG3F-2Nal-THP-APEG2Ser(S*)—N-3Pya-Sar-CON(Me)2;
[1175] cPEG3aCO-Pen(3)—N(N(Me)2)-T-7MeW—K(NMeAc)-Pen(3)-TMAPF-2Nal-THP-Cit-N-3Pya-Sar-CON(Me)2;
[1176] cPEG3aCO-Pen(3)—N(N(Me)2)-T-7MeW—K(NMeAc)-Pen(3)-AEF-2Nal-diFCpx-Dab(NMeAc)—N-3Pya-Sar-CON(Me)2;
[1177] cPEG3aCO-Pen(3)—N(N(Me)2)-T-7MeW—K(NMeAc)-Pen(3)-AEF-2Nal-diFCpx-Dab(NMeAc)—N-3Pya-Sar-CON(Me)2;
[1178] cPEG3aCO-Pen(3)—N(N(Me)2)-T-7MeW—K(Ac)-Pen(3)-TMAPF-2Nal-THP-Dab(NMeAc)—N-3Pya-Sar-CON(Me)2;
[1179] cPEG3aCO-Pen(3)—N(N(Me)2)-T-7MeW—K(NMeAC)-Pen(3)-TMAPF-2Nal-THP-Dab(NMeAc)—N-3Pya-Sar-CON(Me)2;
[1180] MeCO-Pen(3)—N(N(Me)2)-T-7MeW-Dab(NMecarn)-Pen(3)-APEG3F-2Nal-THP-Dab(NMeAc)—N-3Pya-Sar-CON(Me)2;
[1181] MeCO-k(d)-Pen(3)—N(N(Me)2)-T-7MeW—K(NMeAc)-Pen(3)-APEG3F-2Nal-THP-Dab(NMeAc)—N-3Pya-Sar-CON(Me)2;
[1182] cPEG3aCO-Pen(3)—N(N(Me)2)-T-7MeW—K(NMeAc)-Pen(3)-APEG3F-2Nal-THP-Dab(NMeAc)—N-3Pya-Sar-CON(Me)2;
[1183] cPEG3aCO-Pen(3)—N(N(Me)2)-T-7MeW—K(NMeAc)-Pen(3)-APEG3F-2Nal-THP-Dab(NMeAc)—N-3Pya-Sar-CON(Me)2;
[1184] mPEG3CO-SP6-Pen(3)—N(N(Me)2)-T-7MeW—K(NMeAc)-Pen(3)-APEG3F-2Nal-THP-Dab(NMeAc)—N-3Pya-Sar-CON(Me)2;
[1185] cPEG3aCO-Pen(3)—N(N(Me)2)-T-7MeW-Dab(NMecPEG3a)-Pen(3)-AEF-2Nal-THP-Dab(NMeAc)—N-3Pya-Sar-CON(Me)2;
[1186] cPEG3aCO-Pen(3)—N(N(Me)2)-T-7MeW—K(NMeAc)-Pen(3)-AEF-2Nal-THP-Dab(NMeAc)—N-3Pya-Sar-CON(Me)2;
[1187] cPEG5aCO-Pen(3)—N(N(Me)2)-T-7MeW-Q(N(Me)2)-Pen(3)-AEF-2Nal-THP-Dab(NMeAc)—N-3Pya-Sar-CON(Me)2;
[1188] MeCO-Pen(3)—N(N(Me)2)-T-7MeW-Dab(NMeAc)-Pen(3)-AEF-2Nal-THP-Dab(NMeAc)—N-3Pya-Sar-CON(Me)2;
[1189] cPEG3aCO-Pen(3)—N(N(Me)2)-T-7MeW-Dab(NMeAc)-Pen(3)-AEF-2Nal-THP-Dab(NMeAc)—N-3Pya-Sar-CON(Me)2;
[1190] cPEG3aCO-Pen(3)—N(N(Me)2)-T-7MeW-Q(N(Me)2)-Pen(3)-AEF-2Nal-THP-Dab(NMeAc)—N-3Pya-Sar-CON(Me)2;
[1191] cPEG5aCO-Pen(3)—N(N(Me)2)-T-7MeW-Dab(NMeAc)-Pen(3)-AEF-2Nal-THP-Dab(NMeAc)—N-3Pya-Sar-CON(Me)2;
[1192] MeCO-Pen(3)—N(N(Me)2)-T-7MeW-Dab(NMecarn)-Pen(3)-APEG3F-2Nal-THP-Dab(NMecarn)-N-3Pya-Sar-CON(Me)2;
[1193] MeCO-Pen(3)—N(N(Me)2)-T-7MeW-Dab(NMeCOmPEG6)-Pen(3)-AEF-2Nal-THP-Dab(NMeCOmPEG6)—N-3Pya-Sar-CON(Me)2;
[1194] cPEG5aCO-Pen(3)—N(N(Me)2)-T-7MeW-Dab(NMecPEG2a)-Pen(3)-AEF-2Nal-THP-Dab(NMecPEG2a)—N-3Pya-Sar-CON(Me)2;
[1195] MeCO-Pen(3)—N(N(Me)2)-T-7MeW-Dab(NMecPEG3a)-Pen(3)-AEF-2Nal-THP-Dab(NMecPEG3a)—N-3Pya-Sar-CON(Me)2;
[1196] 5cpaCO-Pen(3)—N(N(Me)2)-T-7MeW—K(NMeAc)-Pen(3)-AEF(N(Me)2)-2Nal-THP-Dap(Ac)—N-3Pya-Sar-CON(Me)2;
[1197] MeCO-Pen(3)—N(N(Me)2)-T-7MeW—K(NMeAc)-Pen(3)-AEF(N(Me)2)-2Nal-THP-Dap(Ac)—N-3Pya-Sar-CON(Me)2;
[1198] cPEG3aCO-Pen(3)—N(N(Me)2)-T-7MeW—K(NMeAc)-Pen(3)-APEG3F-2Nal-THP-Dap(NMeAc)—N-3Pya-Sar-CON(Me)2;
[1199] cPEG3aCO-Pen(3)—N(N(Me)2)-T-7MeW—K(Ac)-Pen(3)-TMAPF-2Nal-THP-Dap(NMeAc)—N-3Pya-Sar-CON(Me)2;
[1200] cPEG3aCO-Pen(3)—N(N(Me)2)-T-7MeW—K(NMeAc)-Pen(3)-APEG3F-2Nal-THP-E-N-3Pya-Sar-CON(Me)2;
[1201] cPEG3aCO-Pen(3)—N(N(Me)2)-T-7MeW-Dab(NMeAc)-Pen(3)-AEF-2Nal-THP-E-N-3Pya-Sar-CONH2;
[1202] cPEG3aCO-Pen(3)—N(N(Me)2)-T-7MeW—K(NMeAc)-Pen(3)-TMAPF-2Nal-THP-E-N-3Pya-Sar-CON(Me)2;
[1203] MeCO-hk(Me)₃-Pen(3)—N(N(Me)2)-T-7MeW—K(NMeAc)-Pen(3)-AEF-2Nal-THP-E-N-3Pya-Sar-CON(Me)2;
[1204] MeCO-Pen(3)—N(N(Me)2)-T-7MeW-Dab(NMeCOmPEG6)-Pen(3)-AEF-2Nal-THP-E-N-3Pya-Sar-CON(Me)2;
[1205] MeCO-Pen(3)—N(N(Me)2)-T-7MeW-Dab(NMeCarn)-Pen(3)-AEF-2Nal-THP-E-N-3Pya-Sar-CON(Me)2;
[1206] cPEG5aCO-Pen(3)—N(N(Me)2)-T-7MeW-Dab(NMecPEG5a)-Pen(3)-AEF-2Nal-THP-E-N-3Pya-Sar-CON(Me)2;
[1207] mPEG6CO-SP6-Pen(3)—N(N(Me)2)-T-7MeW-Dab(NMecPEG5a)-Pen(3)-AEF-2Nal-THP-E-N-3Pya-Sar-CON(Me)2;
[1208] MeCO-Pen(3)—N(N(Me)2)-T-7MeW-Dab(NMecarn)-Pen(3)-AEF-2Nal-THP-E-N-3Pya-Sar-CON(Me)2;
[1209] MeCO-Pen(3)—N(N(Me)2)-T-7MeW-Dab(NMecPEG2a)-Pen(3)-AEF-2Nal-THP-E-N-3Pya-Sar-CON(Me)2;
[1210] MeCO-Pen(3)—N(N(Me)2)-T-7MeW-Dab(NMeAc)-Pen(3)-AEF-2Nal-THP-E-N-3Pya-Sar-CON(Me)2;
[1211] MeCO-Pen(3)—N(N(Me)2)-T-7MeW-Q(N(Me)2)-Pen(3)-AEF(N(Me)2)-2Nal-THP-E-N-3Pya-Sar-CON(Me)2;
[1212] MeCO-Pen(3)—N(N(Me)2)-T-7MeW—K(NMeAc)-Pen(3)-AEF(N(Me)2)-2Nal-THP-E-N-3Pya-Sar-CON(Me)2;
[1213] MeCO-k(Me)₃-Pen(3)—N(N(Me)2)-T-7MeW—K(NMeAc)-Pen(3)-AEF(N(Me)2)-2Nal-THP-E-N-3Pya-Sar-CON(Me)2;
[1214] CF3CO-Pen(3)—N(N(Me)2)-T-7MeW—K(NMeAc)-Pen(3)-AEF(N(Me)2)-2Nal-THP-E-N-3Pya-Sar-CON(Me)2;
[1215] 5cpaCO-Pen(3)—N(N(Me)2)-T-7MeW-Q(N(Me)2)-Pen(3)-AEF(N(Me)2)-2Nal-THP-E-N-3Pya-Sar-CON(Me)2;
[1216] CF3CO—K(Me)₃-Pen(3)—N(N(Me)2)-T-7MeW—K(NMeAc)-Pen(3)-AEF(N(Me)2)-2Nal-THP-E-N-3Pya-Sar-CON(Me)2;
[1217] cPEG3aCO-Pen(3)—N(N(Me)2)-T-7MeW—K(NMeAc)-Pen(3)-APEG3F-2Nal-THP—F—N-3Pya-Sar-CON(Me)2;
[1218] cPEG3aCO-Pen(3)—N(N(Me)2)-T-7MeW—K(NMeAc)-Pen(3)-APEG3F-2Nal-THP—K(Ac)—N-3Pya-Sar-CON(Me)2;
[1219] MeCO-Pen(3)—N(N(Me)2)-T-7MeW—K(Me)₃-Pen(3)-AEF(N(Me)2)-2Nal-THP-K(Me)₃—N-3Pya-Sar-CON(Me)2;
[1220] cPEG3aCO-Pen(3)—N(N(Me)2)-T-7MeW—K(NMeAc)-Pen(3)-TMAPF-2Nal-Achx-K(NMeAc)—N-3Pya-Sar-CON(Me)2;
[1221] cPEG3aCO-Pen(3)—N(N(Me)2)-T-7MeW—K(NMeAc)-Pen(3)-TMAPF-2Nal-Acpx-K(NMeAc)—N-3Pya-Sar-CON(Me)2;
[1222] cPEG3aCO-Pen(3)—N(N(Me)2)-T-7MeW—K(NMeAc)-Pen(3)-TMAPF-2Nal-Aib-K(NMeAc)—N-3Pya-Sar-CON(Me)2;
[1223] cPEG3aCO-Pen(3)—N(N(Me)2)-T-7MeW—K(NMeAc)-Pen(3)-TMAPF-2Nal-Chg-K(NMeAc)—N-3Pya-Sar-CON(Me)2;
[1224] cPEG3aCO-Pen(3)—N(N(Me)2)-T-7MeW—K(NMeAc)-Pen(3)—Y(OTz1TMA4)-2Nal-THP-K(NMeAc)—N-3Pya-Sar-CON(Me)2;
[1225] cPEG3aCO-Pen(3)—N(N(Me)2)-T-7(3NAcPh)W—K(NMeAc)-Pen(3)-MMoEF-2Nal-THP-K(NMeAc)—N-3Pya-Sar-CON(Me)2;
[1226] cPEG3aCO-Pen(3)—N(N(Me)2)-T-7MeW-Dap(NMeAc)-Pen(3)-TMAPF-2Nal-THP-K(NMeAc)—N-3Pya-Sar-CON(Me)2;
[1227] cPEG2gCO-Pen(3)—N(N(Me)2)-T-7MeW—K(NMeAc)-Pen(3)-APEG3F-2Nal-THP-K(NMeAc)—N-3Pya-Sar-CON(Me)2;
[1228] cPEG3gCO-Pen(3)—N(N(Me)2)-T-7MeW—K(NMeAc)-Pen(3)-APEG3F-2Nal-THP-K(NMeAc)—N-3Pya-Sar-CON(Me)2;
[1229] cPEG3aCO-Pen(3)—N(N(Me)2)-T-7MeW—K(NMeAc)-Pen(3)-GPEG3F-2Nal-THP-K(NMeAc)—N-3Pya-Sar-CON(Me)2;
[1230] 4cpgCO-Pen(3)—N(N(Me)2)-T-7MeW—K(NMeAc)-Pen(3)-TMAPF-2Nal-THP-K(NMeAc)—N-3Pya-Sar-CON(Me)2;
[1231] cPEG3aCO-Pen(3)—N(N(Me)2)-T-7MeW—K(PEG2PEG2gEC14)-Pen(3)-TMAPF-2Nal-THP-K(NMeAc)—N-3Pya-Sar-CON(Me)2;
[1232] cPEG3aCO-Pen(3)—N(N(Me)2)-T-7MeW—K(4cpg)-Pen(3)-TMAPF-2Nal-THP-K(NMeAc)—N-3Pya-Sar-CON(Me)2;
[1233] cPEG3gCO-Pen(3)—N(N(Me)2)-T-7MeW—K(NMeAc)-Pen(3)-TMAPF-2Nal-THP-K(NMeAc)—N-3Pya-Sar-CON(Me)2;
[1234] cPEG2gCO-Pen(3)—N(N(Me)2)-T-7MeW—K(NMeAc)-Pen(3)-TMAPF-2Nal-THP-K(NMeAc)—N-3Pya-Sar-CON(Me)2;
[1235] C14gEPEG2PEG2CO-k(PEG2PEG2gEC14)-Pen(3)—N(N(Me)2)-T-7MeW-Dab(NMeAc)-Pen(3)-TMAPF-2Nal-THP-K(NMeAc)—N-3Pya-Sar-CON(Me)2;
[1236] C12gEPEG2PEG2CO-k(PEG2PEG2gEC12)-Pen(3)—N(N(Me)2)-T-7MeW-Dab(NMeAc)-Pen(3)-TMAPF-2Nal-THP-K(NMeAc)—N-3Pya-Sar-CON(Me)2;
[1237] cPEG3aCO-Pen(3)—N(N(Me)2)-T-7MeW—K(cPEG3a)-Pen(3)-TMAPF-2Nal-THP-K(NMeAc)—N-3Pya-Sar-CON(Me)2;
[1238] cPEG3aCO-k(PEG2PEG2gEC12)-Pen(3)—N(N(Me)2)-T-7MeW—K(PEG2PEG2gEC12)-Pen(3)-TMAPF-2Nal-THP-K(NMeAc)—N-3Pya-Sar-CON(Me)2;
[1239] cPEG3aCO-k(PEG2PEG2gEC14)-Pen(3)—N(N(Me)2)-T-7MeW—K(NMeAc)-Pen(3)-TMAPF-2Nal-THP-K(NMeAc)—N-3Pya-Sar-CON(Me)2;
[1240] cPEG3aCO-k(PEG2PEG2gEC12)-Pen(3)—N(N(Me)2)-T-7MeW—K(NMeAc)-Pen(3)-TMAPF-2Nal-THP-K(NMeAc)—N-3Pya-Sar-CON(Me)2;
[1241] C14gEPEG2PEG2CO-APEG2Ser(S*)-Pen(3)—N(N(Me)2)-T-7MeW—K(PEG2PEG2gEC14)-Pen(3)-APEG3F-2Nal-THP-K(NMeAc)—N-3Pya-Sar-CON(Me)2;
[1242] C12gEPEG2PEG2CO-APEG2Ser(S*)-Pen(3)—N(N(Me)2)-T-7MeW—K(PEG2PEG2gEC12)-Pen(3)-APEG3F-2Nal-THP-K(NMeAc)—N-3Pya-Sar-CON(Me)2;
[1243] C14gEPEG2PEG2CO-APEG2Ser(S*)-Pen(3)—N(N(Me)2)-T-7MeW—K(NMeAc)-Pen(3)-APEG3F-2Nal-THP-K(NMeAc)—N-3Pya-Sar-CON(Me)2;
[1244] C12gEPEG2PEG2CO-APEG2Ser(S*)-Pen(3)—N(N(Me)2)-T-7MeW—K(NMeAc)-Pen(3)-APEG3F-2Nal-THP-K(NMeAc)—N-3Pya-Sar-CON(Me)2;
[1245] cPEG3aCO-Pen(3)—N(N(Me)2)-T-7MeW-Dab(NMeAc)-Pen(3)-TMAPF-2Nal-THP-K(NMeAc)—N-3Pya-Sar-CON(Me)2;
[1246] cPEG3aCO-Pen(3)—N(N(Me)2)-T-7MeW-Cit-Pen(3)-TMAPF-2Nal-THP-K(NMeAc)—N-3Pya-Sar-CON(Me)2;
[1247] MeCO-r-Pen(3)—N(N(Me)2)-T-7MeW—K(NMeAc)-Pen(3)-TMAPF-2Nal-THP-K(NMeAc)—N-3Pya-Sar-CON(Me)2;
[1248] MeCO-hk(Me)₃-Pen(3)—N(N(Me)2)-T-7MeW—K(NMeAc)-Pen(3)-TMAPF-2Nal-THP-K(NMeAc)—N-3Pya-Sar-CON(Me)2;
[1249] 5cpaCO-Pen(3)—N(N(Me)2)-T-7MeW—K(NMeAc)-Pen(3)-TMAPF-2Nal-THP-K(NMeAc)—N-3Pya-Sar-CON(Me)2;
[1250] cPEG3aCO-Pen(3)—N(N(Me)2)-T-7MeW—K(NMeAc)-Pen(3)-hFTMAPF-2Nal-THP-K(NMeAc)—N-3Pya-Sar-CON(Me)2;
[1251] cPEG3aCO-Pen(3)—N(N(Me)2)-T-7MeW—K(NMeAc)-Pen(3)—F(4Tz1DMA4mPEG)-2Nal-THP-K(NMeAc)—N-3Pya-Sar-CON(Me)2;
[1252] cPEG3aCO-Pen(3)—N(N(Me)2)-T-7MeW—K(NMeAc)-Pen(3)—F(4Tz1MMo4)-2Nal-THP-K(NMeAc)—N-3Pya-Sar-CON(Me)2;
[1253] cPEG3aCO-Pen(3)—N(N(Me)2)-T-7MeW—K(NMeAc)-Pen(3)—F(4Tz1TMA5)-2Nal-THP-K(NMeAc)—N-3Pya-Sar-CON(Me)2;
[1254] cPEG3aCO-Pen(3)—N(N(Me)2)-T-7MeW—K(NMeAc)-Pen(3)—F(4Tz1TMA3)-2Nal-THP-K(NMeAc)—N-3Pya-Sar-CON(Me)2;
[1255] cPEG3aCO-Pen(3)—N(N(Me)2)-T-7MeW—K(NMeAc)-Pen(3)—F(4Tz1TMA2)-2Nal-THP-K(NMeAc)—N-3Pya-Sar-CON(Me)2;
[1256] cPEG3aCO-Pen(3)—N(N(Me)2)-T-7MeW—K(NMeAc)-Pen(3)—F(4Tz1TMA1)-2Nal-THP-K(NMeAc)—N-3Pya-Sar-CON(Me)2;
[1257] cPEG3aCO-Pen(3)—N(N(Me)2)-T-7MeW—K(NMeAc)-Pen(3)—F(4N3)-2Nal-THP-K(NMeAc)—N-3Pya-Sar-CON(Me)2;
[1258] cPEG3aCO-Pen(3)—N(N(Me)2)-T-7MeW—K(Me)₃-Pen(3)-TMAPF-2Nal-THP-K(NMeAc)—N-3Pya-Sar-CON(Me)2;
[1259] C14gEPEG2PEG2CO-hk(Me)₃-Pen(3)—N(N(Me)2)-T-7MeW—K(PEG2PEG2gEC14)-Pen(3)-TMAPF-2Nal-THP-K(NMeAc)—N-3Pya-Sar-CON(Me)2;
[1260] C14gEPEG2PEG2CO-hk(Me)₃-Pen(3)—N(N(Me)2)-T-7MeW—K(NMeAc)-Pen(3)-TMAPF-2Nal-THP-K(NMeAc)—N-3Pya-Sar-CON(Me)2;
[1261] C12gEPEG2PEG2CO-hk(Me)₃-Pen(3)—N(N(Me)2)-T-7MeW—K(PEG2PEG2gEC12)-Pen(3)-TMAPF-2Nal-THP-K(NMeAc)—N-3Pya-Sar-CON(Me)2;
[1262] C12gEPEG2PEG2CO-hk(Me)₃-Pen(3)—N(N(Me)2)-T-7MeW—K(NMeAc)-Pen(3)-TMAPF-2Nal-THP-K(NMeAc)—N-3Pya-Sar-CON(Me)2;
[1263] cPEG3aCO-Pen(3)—N(N(Me)2)-T-7MeW—K(NMeAc)-Pen(3)-AEF(N(Me)2)-2Nal-THP-K(NMeAc)—N-3Pya-Sar-CON(Me)2;
[1264] cPEG3aCO-Pen(3)—N(N(Me)2)-T-7MeW—K(NMeAc)-Pen(3)-AEF-2Nal-THP-K(NMeAc)—N-3Pya-Sar-CON(Me)2;
[1265] MeCO-APEG2Ser(S*)-Pen(3)—N(N(Me)2)-T-7MeW—K(NMeAc)-Pen(3)-APEG3F-2Nal-THP-K(NMeAc)—N-3Pya-Sar-CON(Me)2;
[1266] MeCO-APEG2Ser(R*)-Pen(3)—N(N(Me)2)-T-7MeW—K(NMeAc)-Pen(3)-APEG3F-2Nal-THP-K(NMeAc)—N-3Pya-Sar-CON(Me)2;
[1267] cPEG3aCO-Pen(3)—N(N(Me)2)-T-7MeW-Q(N(Me)2)-Pen(3)-TMAPF-2Nal-THP-K(NMeAC)—N-3Pya-Sar-CON(Me)2;
[1268] cPEG3aCO-Pen(3)—N(N(Me)2)-T-7MeW—K(NMeAc)-Pen(3)—Y(OZOXIMECh)-2Nal-THP-K(NMeAc)—N-3Pya-Sar-CON(Me)2;
[1269] cPEG3aCO-Pen(3)—N(N(Me)2)-T-7MeW—K(NMeAc)-Pen(3)—Y(OEOXIMECh)-2Nal-THP-K(NMeAc)—N-3Pya-Sar-CON(Me)2;
[1270] cPEG3aCO-Pen(3)—N(N(Me)2)-T-7MeW—K(NMeAc)-Pen(3)—F(4G)-2Nal-THP-K(NMeAc)—N-3Pya-Sar-CON(Me)2;
[1271] cPEG3aCO-Pen(3)—N(N(Me)2)-T-7MeW—K(NMeAc)-Pen(3)—F(4Tz1MME)-2Nal-THP-K(NMeAc)—N-3Pya-Sar-CON(Me)2;
[1272] cPEG3aCO-Pen(3)—N(N(Me)2)-T-7MeW—K(NMeAc)-Pen(3)—F(4Tz1TMA4)-2Nal-THP-K(NMeAc)—N-3Pya-Sar-CON(Me)2;
[1273] cPEG3aCO-Pen(3)—N(N(Me)2)-T-7MeW—K(NMeAc)-Pen(3)-dFPPEG3F-2Nal-THP-K(NMeAc)—N-3Pya-Sar-CON(Me)2;
[1274] cPEG3aCO-Pen(3)—N(N(Me)2)-T-7MeW—K(NMeAc)-Pen(3)-NPyPEG3F-2Nal-THP-K(NMeAc)—N-3Pya-Sar-CON(Me)2;
[1275] cPEG3aCO-Pen(3)—N(N(Me)2)-T-7MeW—K(NMeAc)-Pen(3)-TMA8F-2Nal-THP-K(NMeAc)—N-3Pya-Sar-CON(Me)2;
[1276] cPEG3aCO-Pen(3)—N(N(Me)2)-T-7(3NAcPh)W—K(NMeAc)-Pen(3)-TMAPF-2Nal-THP-K(NMeAc)—N-3Pya-Sar-CON(Me)2;
[1277] cPEG3aCO-Pen(3)—N(N(Me)2)-T-7MeW—K(NMeAc)-Pen(3)-TMA6F-2Nal-THP-K(NMeAc)—N-3Pya-Sar-CON(Me)2;
[1278] cPEG3aCO-Pen(3)—N(N(Me)2)-T-7MeW—K(NMeAc)-Pen(3)-Diazabiclyclooctane6F-2Nal-THP-K(NMeAc)—N-3Pya-Sar-CON(Me)2;
[1279] cPEG3aCO-Pen(3)—N(N(Me)2)-T-7MeW—K(NMeAc)-Pen(3)—Y(OTzlChC16)-2Nal-THP-K(NMeAc)—N-3Pya-Sar-CON(Me)2;
[1280] cPEG3aCO-Pen(3)—N(N(Me)2)-T-7MeW—K(NMeAc)-Pen(3)—Y(OTzlC1 aC8)-2Nal-THP-K(NMeAc)—N-3Pya-Sar-CON(Me)2;
[1281] cPEG3aCO-Pen(3)—N(N(Me)2)-T-7MeW—K(NMeAc)-Pen(3)-TzlChmPEG3-2Nal-THP-K(NMeAc)—N-3Pya-Sar-CON(Me)2;
[1282] cPEG3aCO-Pen(3)—N(N(Me)2)-T-7MeW—K(NMeAc)-Pen(3)-TzlChmPEG-2Nal-THIP-K(NMeAc)—N-3Pya-Sar-CON(Me)2;
[1283] cPEG3aCO-Pen(3)—N(N(Me)2)-T-7MeW—K(NMeAc)-Pen(3)-Tzl(Ch)-2Nal-THP-K(NMeAc)—N-3Pya-Sar-CON(Me)2;
[1284] cPEG3aCO-Pen(3)—N(N(Me)2)-T-7MeW—K(NMeAc)-Pen(3)—Y(OTzlCh)-2Nal-THIP-K(NMeAc)—N-3Pya-Sar-CON(Me)2;
[1285] cPEG3aCO-Pen(3)—N(N(Me)2)-T-7MeW—K(NMeAc)-Pen(3)—Y(OTzlChmPEG)-2Nal-THP-K(NMeAc)—N-3Pya-Sar-CON(Me)2;
[1286] cPEG3aCO-Pen(3)—N(N(Me)2)-T-7MeW—K(NMeAc)-Pen(3)—Y(OTz1TMA4)-2Nal-THP-K(NMeAc)—N-3Pya-Sar-CON(Me)2;
[1287] cPEG3aCO-Pen(3)—N(N(Me)2)-T-7MeW—K(NMeAc)-Pen(3)—Y(OTzlChmPEG3)-2Nal-THP-K(NMeAc)—N-3Pya-Sar-CON(Me)2;
[1288] cPEG3aCO-Pen(3)—N(N(Me)2)-T-7MeW—K(NMeAc)-Pen(3)-AEF(SPD)-2Nal-THP-K(NMeAc)—N-3Pya-Sar-CON(Me)2;
[1289] cPEG3aCO-Pen(3)—N(N(Me)2)-T-7MeW—K(NMeAc)-Pen(3)-MMoPF-2Nal-THIP-K(NMeAc)—N-3Pya-Sar-CON(Me)2;
[1290] cPEG3aCO-Pen(3)—N(N(Me)2)-T-7MeW—K(NMeAc)-Pen(3)-PiperazinequatF-2Nal-THP-K(NMeAc)—N-3Pya-Sar-CON(Me)2;
[1291] cPEG3aCO-Pen(3)—N(N(Me)2)-T-7MeW—K(NMeAc)-Pen(3)-mPEG3 TMA4F-2Nal-THP-K(NMeAc)—N-3Pya-Sar-CON(Me)2;
[1292] cPEG3aCO-Pen(3)—N(N(Me)2)-T-7MeW—K(NMeAc)-Pen(3)-morfTMA4F-2Nal-THP-K(NMeAc)—N-3Pya-Sar-CON(Me)2;
[1293] cPEG3aCO-Pen(3)—N(N(Me)2)-T-7MeW—K(NMeAc)-Pen(3)-DMTASF-2Nal-THP-K(NMeAc)—N-3Pya-Sar-CON(Me)2;
[1294] MeCO-Pen(3)—N(N(Me)2)-T-7MeW-APEG2Ser(R*)-Pen(3)-APEG3F-2Nal-THP-K(NMeAc)—N-3Pya-Sar-CON(Me)2;
[1295] MeCO-Pen(3)—N(N(Me)2)-T-7MeW-APEG2Ser(S*)-Pen(3)-APEG3F-2Nal-THP-K(NMeAc)—N-3Pya-Sar-CON(Me)2;
[1296] cPEG3aCO-Pen(3)—N(N(Me)2)-T-7MeW—K(NMeAc)-Pen(3)-AEF(BisPEG2a)(S*)-2Nal-THP-K(NMeAc)—N-3Pya-Sar-CON(Me)2;
[1297] cPEG3aCO-Pen(3)—N(N(Me)2)-T-7MeW—K(NMeAc)-Pen(3)-AEF(BisPEG2a)(RS)-2Nal-THP-K(NMeAc)—N-3Pya-Sar-CON(Me)2;
[1298] cPEG3aCO-Pen(3)—N(N(Me)2)-T-7MeW—K(NMeAc)-Pen(3)-AEF(aPEG2a)-2Nal-THP-K(NMeAc)—N-3Pya-Sar-CON(Me)2;
[1299] cPEG3aCO-Pen(3)—N(N(Me)2)-T-7MeW—K(NMeAc)-Pen(3)-TBAPEG3F-2Nal-THP-K(NMeAc)—N-3Pya-Sar-CON(Me)2;
[1300] cPEG3aCO-Pen(3)—N(N(Me)2)-T-7MeW—K(NMeAc)-Pen(3)-MTASF-2Nal-THP-K(NMeAc)—N-3Pya-Sar-CON(Me)2;
[1301] cPEG3aCO-Pen(3)—N(N(Me)2)-T-7MeW—K(NMeAc)-Pen(3)-AEF(NMe3)-2Nal-THP-K(NMeAc)—N-3Pya-Sar-CON(Me)2;
[1302] cPEG3aCO-Pen(3)—N(N(Me)2)-T-7MeW—K(NMeAc)-Pen(3)—YC8CO(NHPEG3a)-2Nal-THP-K(NMeAc)—N-3Pya-Sar-CON(Me)2;
[1303] cPEG3aCO-Pen(3)—N(N(Me)2)-T-7MeW-APEG2Ser(S*)-Pen(3)-TMAPF-2Nal-THP-K(NMeAc)—N-3Pya-Sar-CON(Me)2;
[1304] cPEG3aCO-Pen(3)—N(N(Me)2)-T-7MeW-APEG2Ser(R*)-Pen(3)-TMAPF-2Nal-THP-K(NMeAc)—N-3Pya-Sar-CON(Me)2;
[1305] cPEG3aCO-Pen(3)—N(N(Me)2)-T-7MeW-APEG2Ser-Pen(3)-AEF-2Nal-THP-K(NMeAc)—N-3Pya-Sar-CON(Me)2;
[1306] cPEG3aCO-Pen(3)—N(N(Me)2)-T-7MeW-APEG2Ser(R*)-Pen(3)-AEF-2Nal-THP-K(NMeAc)—N-3Pya-Sar-CON(Me)2;
[1307] cPEG3aCO-Pen(3)—N(N(Me)2)-T-7MeW—K(Ac)-Pen(3)-APEG3F-2Nal-THP-K(NMeAc)—N-3Pya-Sar-CON(Me)2;
[1308] cPEG3aCO-Pen(3)—N(N(Me)2)-T-7MeW—K(NMeAc)-Pen(3)-YC8COPip-2Nal-THP-K(NMeAc)—N-3Pya-Sar-CON(Me)2;
[1309] cPEG3aCO-Pen(3)—N(N(Me)2)-T-7MeW—K(NMeAc)-Pen(3)-AEF(NMeBismPEG3)-2Nal-THP-K(NMeAc)—N-3Pya-Sar-CON(Me)2;
[1310] cPEG3aCO-Pen(3)—N(N(Me)2)-T-7MeW—K(NMeAc)-Pen(3)-AEF(NMe2mPEG3)-2Nal-THP-K(NMeAc)—N-3Pya-Sar-CON(Me)2;
[1311] cPEG3aCO-Pen(3)—N(N(Me)2)-T-7MeW—K(NMeAc)-Pen(3)-AEF(PEG2a)-2Nal-THP-K(NMeAc)—N-3Pya-Sar-CON(Me)2;
[1312] cPEG3aCO-Pen(3)—N(N(Me)2)-T-7MeW—K(NMeAc)-Pen(3)-AEF(NMePEG2a)-2Nal-THP-K(NMeAc)—N-3Pya-Sar-CON(Me)2;
[1313] cPEG3aCO-Pen(3)—N(N(Me)2)-T-7MeW—K(NMeAc)-Pen(3)—Y(C9OH)-2Nal-THP-K(NMeAc)—N-3Pya-Sar-CON(Me)2;
[1314] cPEG3aCO-Pen(3)—N(N(Me)2)-T-7MeW—K(NMeAc)-Pen(3)-AEF(MePrpa)-2Nal-THP-K(NMeAc)—N-3Pya-Sar-CON(Me)2;
[1315] MeCO-APEG2ser-Pen(3)—N(N(Me)2)-T-7MeW—K(NMeAc)-Pen(3)-APEG3F-2Nal-THP-K(NMeAc)—N-3Pya-Sar-CON(Me)2;
[1316] cPEG3aCO-Pen(3)—N(N(Me)2)-T-7MeW—K(NMeAc)-Pen(3)-NPyEF-2Nal-THP-K(NMeAc)—N-3Pya-Sar-CON(Me)2;
[1317] cPEG3aCO-Pen(3)—N(N(Me)2)-T-7MeW—K(NMeAc)-Pen(3)-TMA3F-2Nal-THP-K(NMeAc)—N-3Pya-Sar-CON(Me)2;
[1318] cPEG3aCO-Pen(3)—N(N(Me)2)-T-7MeW—K(NMeAc)-Pen(3)-TMA3F-2Nal-THP-K(NMeAc)—N-3Pya-Sar-CON(Me)2;
[1319] cPEG3aCO-Pen(3)—N(N(Me)2)-T-7MeW—K(NMeAc)-Pen(3)-mPEG2TMA2F-2Nal-THP-K(NMeAc)—N-3Pya-Sar-CON(Me)2;
[1320] cPEG3aCO-Pen(3)—N(N(Me)2)-T-7MeW—K(NMeAc)-Pen(3)-mPEG2TMA4F-2Nal-THP-K(NMeAc)—N-3Pya-Sar-CON(Me)2;
[1321] cPEG3aCO-Pen(3)—N(N(Me)2)-T-7MeW—K(NMeAc)-Pen(3)-TMA4F-2Nal-THP-K(NMeAc)—N-3Pya-Sar-CON(Me)2;
[1322] mPEG3CO-SP6-Pen(3)—N(N(Me)2)-T-7MeW—K(NMeAc)-Pen(3)-APEG3F-2Nal-THP-K(NMeAc)—N-3Pya-Sar-CON(Me)2;
[1323] cPEG3aCO-Pen(3)—N(N(Me)2)-T-7MeW—K(NMeAc)-Pen(3)-MPzPEG3F-2Nal-THP-K(NMeAc)—N-3Pya-Sar-CON(Me)2;
[1324] cPEG3aCO-Pen(3)—N(N(Me)2)-T-7MeW—K(NMeAc)-Pen(3)-MMPEG3F-2Nal-THP-K(NMeAc)—N-3Pya-Sar-CON(Me)2;
[1325] cPEG3aCO-Pen(3)—N(N(Me)2)-T-7MeW—K(NMeAc)-Pen(3)-ACHMF-2Nal-THP-K(NMeAc)—N-3Pya-Sar-CON(Me)2;
[1326] MeCO-Pen(3)—N(N(Me)2)-T-7MeW—K(NMePEG3a)-Pen(3)-APEG3F-2Nal-THP-K(NMeAc)—N-3Pya-Sar-CON(Me)2;
[1327] MeCO-k(Me)₃-Pen(3)—N(N(Me)2)-T-7MeW—K(NMeAc)-Pen(3)-APEG3F-2Nal-THP-K(NMeAc)—N-3Pya-Sar-CON(Me)2;
[1328] cPEG3aCO-Pen(3)—N(N(Me)2)-T-7MeW—K(NMeAc)-Pen(3)-DMMMF-2Nal-THP-K(NMeAc)—N-3Pya-Sar-CON(Me)2;
[1329] MeCO-Pen(3)—N(N(Me)2)-T-7MeW-Dab(NMecarn)-Pen(3)-APEG3F-2Nal-THP-K(NMeAc)—N-3Pya-Sar-CON(Me)2;
[1330] cPEG3aCO-Pen(3)—N(N(Me)2)-T-7MeW—K(NMeAc)-Pen(3)-ACHMF-2Nal-THP-K(NMeAc)—N-3Pya-Sar-CON(Me)2;
[1331] cPEG3aCO-Pen(3)—N(N(Me)2)-T-7MeW—K(NMeAc)-Pen(3)-AEF((Ch)cPEG3a)-2Nal-THP-K(NMeAc)—N-3Pya-Sar-CON(Me)2;
[1332] cPEG3aCO-Pen(3)—N(N(Me)2)-T-7MeW—K(NMeAc)-Pen(3)-AEF(AcCh)-2Nal-THP-K(NMeAc)—N-3Pya-Sar-CON(Me)2;
[1333] cPEG3aCO-Pen(3)—N(N(Me)2)-T-7MeW—K(NMeAc)-Pen(3)-AEF(NsCh)-2Nal-THP-K(NMeAc)—N-3Pya-Sar-CON(Me)2;
[1334] cPEG3aCO-Pen(3)—N(N(Me)2)-T-7MeW—K(NMeAc)-Pen(3)-AEF(BisMEP))-2Nal-THP-K(NMeAc)—N-3Pya-Sar-CON(Me)2;
[1335] cPEG3aCO-Pen(3)—N(N(Me)2)-T-7MeW—K(NMeAc)-Pen(3)-DMPMF-2Nal-THP-K(NMeAc)—N-3Pya-Sar-CON(Me)2;
[1336] cPEG3aCO-Pen(3)—N(N(Me)2)-T-7MeW—K(NMeAc)-Pen(3)-APEG2F-2Nal-THP-K(NMeAc)—N-3Pya-Sar-CON(Me)2;
[1337] cPEG3aCO-Pen(3)—N(N(Me)2)-T-7MeW—K(NMeAc)-Pen(3)-MMoEF-2Nal-THP-K(NMeAc)—N-3Pya-Sar-CON(Me)2;
[1338] cPEG3aCO-Pen(3)—N(N(Me)2)-T-7MeW—K(NMeAc)-Pen(3)-4DMPzEF-2Nal-THP-K(NMeAc)—N-3Pya-Sar-CON(Me)2;
[1339] MeCO-Pen(3)—N(N(Me)2)-T-7MeW—K(NMeAc)-Pen(3)-TMAPF-2Nal-THP-K(NMeAc)—N-3Pya-Sar-CON(Me)2;
[1340] cPEG3aCO-Pen(3)—N(N(Me)2)-T-7MeW—K(NMeAc)-Pen(3)-4DMPEF-2Nal-THP-K(NMeAc)—N-3Pya-Sar-CON(Me)2;
[1341] MeCO-Pen(3)—N(N(Me)2)-T-7MeW—K(NMeAc)-Pen(3)-APEG3F-2Nal-TTHP-K(NMeAc)—N-3Pya-Sar-CON(Me)2;
[1342] cPEG3aCO-Pen(3)—N(N(Me)2)-T-7MeW—K(NMeAc)-Pen(3)-APEG3F-2Nal-THP-K(NMeAc)—N-3Pya-Sar-CON(Me)2;
[1343] cPEG3aCO-Pen(3)—N(N(Me)2)-T-7MeW—K(NMeAc)-Pen(3)-TMAPF-2Nal-THP-K(NMeAc)—N-3Pya-Sar-CON(Me)2;
[1344] MeCO-Pen(3)—N(N(Me)2)-T-7MeW—K(NMeAc)-Pen(3)-AEF(N(Me)2)-2Nal-THP-K(NMeAc)—N-3Pya-Sar-CON(Me)2;
[1345] CF3CO-Pen(3)—N(N(Me)2)-T-7CF3W—K(NMeAc)-Pen(3)-AEF(N(Me)2)-2Nal-THP-K(NMeAc)—N-3Pya-Sar-CON(Me)2;
[1346] CF3CO-Pen(3)—N(N(Me)2)-T-7CF3W—K(NMeAc)-Pen(3)-AEF-2Nal-THP-K(NMeAc)—N-3Pya-Sar-CON(Me)2;
[1347] CF3CO-Pen(3)—N(N(Me)2)-T-7MeW—K(NMeAc)-Pen(3)-AEF-2Nal-THP-K(NMeAc)—N-3Pya-Sar-CON(Me)2;
[1348] CF3CO-Pen(3)—N(N(Me)2)-T-7MeW—K(NMeAc)-Pen(3)-AEF(N(Me)2)-2Nal-THP-K(NMeAc)—N-3Pya-Sar-CON(Me)2;
[1349] MeCO-Pen(3)—N(N(Me)2)-T-7MeW—K(NMeAc)-Pen(3)-APEG3F-2Nal-TTHP-K(NMePEG3a)—N-3Pya-Sar-CON(Me)2;
[1350] cPEG3aCO-Pen(3)—N(N(Me)2)-T-7MeW—K(NMeAc)-Pen(3)-TMAPF-2Nal-THP-K(PEG2PEG2gEC12)—N-3Pya-Sar-CON(Me)2;
[1351] cPEG3aCO-Pen(3)—N(N(Me)2)-T-7MeW—K(PEG2PEG2gEC12)-Pen(3)-TMAPF-2Nal-THP-K(PEG2PEG2gEC12)—N-3Pya-Sar-CON(Me)2;
[1352] cPEG3aCO-k(PEG2PEG2gEC12)-Pen(3)—N(N(Me)2)-T-7MeW—K(NMeAc)-Pen(3)-TMAPF-2Nal-THP-K(PEG2PEG2gEC12)—N-3Pya-Sar-CON(Me)2;
[1353] C12gEPEG2PEG2CO-hk(Me)₃-Pen(3)—N(N(Me)2)-T-7MeW—K(NMeAc)-Pen(3)-TMAPF-2Nal-THP-K(PEG2PEG2gEC12)—N-3Pya-Sar-CON(Me)2;
[1354] C12gEPEG2PEG2CO-hk(Me)₃-Pen(3)—N(N(Me)2)-T-7MeW—K(NMeAc)-Pen(3)-TMAPF-2Nal-K(PEG2PEG2gEC12)—N-3Pya-Sar-CON(Me)2;
[1355] cPEG3aCO-Pen(3)—N(N(Me)2)-T-7MeW—K(PEG2PEG2gEC14)-Pen(3)-TMAPF-2Nal-THP-K(PEG2PEG2gEC14)—N-3Pya-Sar-CON(Me)2;
[1356] cPEG3aCO-Pen(3)—N(N(Me)2)-T-7MeW—K(NMeAc)-Pen(3)-TMAPF-2Nal-THP-K(PEG2PEG2gEC14)—N-3Pya-Sar-CON(Me)2;
[1357] cPEG3aCO-k(PEG2PEG2gEC14)-Pen(3)—N(N(Me)2)-T-7MeW—K(NMeAc)-Pen(3)-TMAPF-2Nal-THP-K(PEG2PEG2gEC14)—N-3Pya-Sar-CON(Me)2;
[1358] C14gEPEG2PEG2CO-hk(Me)₃-Pen(3)—N(N(Me)2)-T-7MeW—K(NMeAc)-Pen(3)-TMAPF-2Nal-THP-K(PEG2PEG2gEC14)—N-3Pya-Sar-CON(Me)2;
[1359] cPEG3aCO-Pen(3)—N(N(Me)2)-T-7MeW—K(NMeAc)-Pen(3)-APEG3F-2Nal-THP-L-N-3Pya-Sar-CON(Me)2;
[1360] 5cpaCO-Pen(3)—N(N(Me)2)-T-7MeW-Q(N(Me)2)-Pen(3)-AEF(N(Me)2)-2Nal-Pip(NMe2)-Q(N(Me)2)—N-3Pya-Sar-CON(Me)2;
[1361] cPEG3aCO-Pen(3)—N(N(Me)2)-T-7MeW—K(NMeAC)-Pen(3)-TMAPF-2Nal-THP-Q(N(Me)2)—N-3Pya-Sar-CON(Me)2;
[1362] cPEG3aCO-Pen(3)—N(N(Me)2)-T-7MeW-Q(N(Me)2)-Pen(3)-AEF(N(Me)2)-2Nal-THP-Q(N(Me)2)—N-3Pya-Sar-CON(Me)2;
[1363] cPEG3aCO-Pen(3)—N(N(Me)2)-T-7MeW-Q(N(Me)2)-Pen(3)-AEF-2Nal-THP-Q(N(Me)2)—N-3Pya-Sar-CON(Me)2;
[1364] MeCO-Pen(3)—N(N(Me)2)-T-7MeW-Q(N(Me)2)-Pen(3)-AEF(N(Me)2)-2Nal-THP-Q(N(Me)2)—N-3Pya-Sar-CON(Me)2;
[1365] 5cpaCO-Pen(3)—N(N(Me)2)-T-7MeW-Q(N(Me)2)-Pen(3)-TMAPF-2Nal-THP-Q(N(Me)2)—N-3Pya-Sar-CON(Me)2;
[1366] CF3CO-k(5cpa)-Pen(3)—N(N(Me)2)-T-7MeW-Q(N(Me)2)-Pen(3)-AEF(N(Me)2)-2Nal-THP-Q(N(Me)2)—N-3Pya-Sar-CON(Me)2;
[1367] 5cpaCO-Pen(3)—N(N(Me)2)-T-7MeW-Q(N(Me)2)-Pen(3)-AEF(N(Me)2)-2Nal-THP-Q(N(Me)2)—N-3Pya-Sar-CON(Me)2;
[1368] cPEG3aCO-Pen(3)—N(N(Me)2)-T-7MeW—K(NMeAc)-Pen(3)-APEG3F-2Nal-THP—W—N-3Pya-Sar-CON(Me)2;
[1369] cPEG3aCO-Pen(3)—N(N(Me)2)-T-7MeW—K(NMeAc)-Pen(3)-AEF(BisMEPa)-2Nal-THP-K(NMeAc)—N-3Pya-Sar-CON(Me)2;
[1370] cPEG3aCO-Pen(3)—N(N(Me)2)-T-7MeW-Dab(NMeAc)-Pen(3)-AEF-2Nal-THP-Dab(NMeAc)—N-3Pya-Sar-CONH(PEG3a);
[1371] cPEG3aCO-Pen(3)—N(N(Me)2)-T-7MeW—K(NMeAC)-Pen(3)-TMAPF-2Nal-THP-K(NMeAC)—N-3Pya-NMeK(PEG2PEG2C12)—CONH2;
[1372] cPEG3aCO-Pen(3)—N(N(Me)2)-T-7MeW—K(Ac)-Pen(3)-TMAPF-2Nal-THP-K(NMeAc)—N-3Pya-NMeK(PEG2PEG2C14)—CONH2;
[1373] C12gEPEG2PEG2CO-Pen(3)—N(N(Me)2)-T-7MeW—K(Ac)-Pen(3)-TMAPF-2Nal-THP-K(NMeAc)—N-3Pya-NMeK(PEG2PEG2gEC12)—CONH2;
[1374] cPEG3aCO-Pen(3)—N(N(Me)2)-T-7MeW—K(PEG2PEG2gEC12)-Pen(3)-TMAPF-2Nal-THP-K(NMeAc)—N-3Pya-NMeK(PEG2PEG2gEC12)—CONH2;
[1375] cPEG3aCO-k(PEG2PEG2gEC12)-Pen(3)—N(N(Me)2)-T-7MeW—K(Ac)-Pen(3)-TMAPF-2Nal-THP-K(NMeAc)—N-3Pya-NMeK(PEG2PEG2gEC12)—CONH2;
[1376] cPEG3aCO-Pen(3)—N(N(Me)2)-T-7MeW—K(NMeAC)-Pen(3)-TMAPF-2Nal-THP-K(NMeAC)—N-3Pya-NMeK(PEG2PEG2gEC12)—CONH2;
[1377] cPEG3aCO-Pen(3)—N(N(Me)2)-T-7MeW—K(Ac)-Pen(3)-TMAPF-2Nal-THP-K(NMeAC)—N-3Pya-NMeK(PEG2PEG2gEC12)—CONH2;
[1378] cPEG3aCO-Pen(3)—N(N(Me)2)-T-7MeW—K(Ac)-Pen(3)-TMAPF-2Nal-THP-K(PEG2PEG2gEC12)—N-3Pya-NMeK(PEG2PEG2gEC12)—CONH2;
[1379] cPEG3aCO-Pen(3)—N(N(Me)2)-T-7MeW—K(PEG2PEG2gEC14)-Pen(3)-TMAPF-2Nal-THP-K(NMeAc)—N-3Pya-NMeK(PEG2PEG2gEC14)—CONH2;
[1380] C14gEPEG2PEG2CO-Pen(3)—N(N(Me)2)-T-7MeW—K(Ac)-Pen(3)-TMAPF-2Nal-THP-K(NMeAc)—N-3Pya-NMeK(PEG2PEG2gEC14)—CONH2;
[1381] cPEG3aCO-k(PEG2PEG2gEC14)-Pen(3)—N(N(Me)2)-T-7MeW—K(Ac)-Pen(3)-TMAPF-2Nal-THP-K(NMeAc)—N-3Pya-NMeK(PEG2PEG2gEC14)—CONH2;
[1382] cPEG3aCO-Pen(3)—N(N(Me)2)-T-7MeW—K(NMeAC)-Pen(3)-TMAPF-2Nal-THP-K(NMeAC)—N-3Pya-NMeK(PEG2PEG2gEC14)—CONH2;
[1383] cPEG3aCO-Pen(3)—N(N(Me)2)-T-7MeW—K(Ac)-Pen(3)-TMAPF-2Nal-THP-K(PEG2PEG2gEC14)—N-3Pya-NMeK(PEG2PEG2gEC14)—CONH2;
[1384] cPEG3aCO-Pen(3)—N(N(Me)2)-T-7MeW—K(Ac)-Pen(3)-TMAPF-2Nal-THP-K(NMeAc)—N-3Pya-NMeK(PEG2PEG2K(PEG2PEG2gEC12)₂)—CONH2;
[1385] cPEG3aCO-Pen(3)—N(N(Me)2)-T-7MeW—K(Ac)-Pen(3)-TMAPF-2Nal-THP-K(NMeAc)—N-3Pya-NMeK(PEG2PEG2K(PEG2PEG2PEG2PEG2gEC12)₂)—CONH2;
[1386] cPEG3aCO-Pen(3)—N(N(Me)2)-T-7MeW—K(Ac)-Pen(3)-TMAPF-2Nal-THP-K(PEG2PEG2PEG2gEC12))—N-3Pya-NMeK(PEG2PEG2PEG2gEC12)—CONH2;
[1387] cPEG3aCO-k(PEG2PEG2PEG2PEG2gEC12)-Pen(3)—N(N(Me)2)-T-7MeW—K(Ac)-Pen(3)-TMAPF-2Nal-THP-K(NMeAc)—N-3Pya-NMeK(PEG2PEG2PEG2PEG2gEC12)—CONH2;
[1388] cPEG3aCO-k(PEG2PEG6gEC12)-Pen(3)—N(N(Me)2)-T-7MeW—K(Ac)-Pen(3)-TMAPF-2Nal-THP-K(NMeAc)—N-3Pya-NMeK(PEG2PEG6gEC12)—CONH2;
[1389] cPEG3aCO-Pen(3)—N(N(Me)2)-T-7MeW—K(Ac)-Pen(3)-TMAPF-2Nal-THP-K(NMeAc)—N-3Pya-NMeK(PEG2PEG6gEC12)—CONH2;
[1390] cPEG3aCO-Pen(3)—N(N(Me)2)-T-7MeW—K(Ac)-Pen(3)-TMAPF-2Nal-THP-K(NMeAc)—N-3Pya-NMeK(PEG2PEG6gEC14)—CONH2;
[1391] cPEG3aCO-Pen(3)—N(N(Me)2)-T-7MeW—K(Ac)-Pen(3)-TMAPF-2Nal-THP-K(NMeAc)—N-3Pya-NMeK(SP6PEG2PEG2C12)—CONH2;
[1392] cPEG3aCO-Pen(3)—N(N(Me)2)-T-7MeW—K(Ac)-Pen(3)-TMAPF-2Nal-THP-K(NMeAc)—N-3Pya-NMeK(SP6PEG2PEG2gEC12)—CONH2;
[1393] MeCO-Pen(3)—N(N(Me)2)-T-7MeW—K(Ac)-Pen(3)-AEF-2Nal-THP—K(Ac)—N-3Pya-Sar-CONH2;
[1394] cPEG3aCO-Pen(3)—N(N(Me)2)-T-7MeW—K(NMeAc)-Pen(3)-AEF-2Nal-THP—K(Ac)—N-3Pya-Sar-CONH2;
[1395] mPEG3CO-SP6-Pen(3)—N(N(Me)2)-T-7MeW—K(NMeAc)-Pen(3)-AEF-2Nal-THP—K(Ac)—N-3Pya-Sar-CONH2;
[1396] CF3CO-Pen(3)—N(N(Me)2)-T-7MeW—K(Ac)-Pen(3)-AEF-2Nal-THP—K(Ac)—N-3Pya-Sar-CONH2;
[1397] cPEG3aCO-Pen(3)—N(N(Me)2)-T-7MeW—K(NMeAc)-Pen(3)-APEG3F-2Nal-THP-K(NMeAc)—N-3Pya-Sar-CONH2;
[1398] cPEG3aCO-Pen(3)—N(N(Me)2)-T-7MeW-Dab(NMeAc)-Pen(3)-TMAPF-2Nal-THP-K(NMeAc)—N-3Pya-Sar-CONH2;
[1399] cPEG3aCO-Pen(3)—N(N(Me)2)-T-7MeW—K(NMeAc)-Pen(3)-TMAPF-2Nal-THP-K(NMeAc)—N-3Pya-Sar-CONH2;
[1400] MeCO-Pen(3)—N(N(Me)2)-T-7MeW—K(NMeAc)-Pen(3)-AEF-2Nal-THP-K(NMeAc)—N-3Pya-Sar-CONH2;
[1401] cPEG3aCO-Pen(3)—N(N(Me)2)-T-7MeW-Dab(NMeAc)-Pen(3)-AEF-2Nal-THP-K(NMeAc)—N-3Pya-Sar-CONH2;
[1402] cPEG3aCO-Pen(3)—N(N(Me)2)-T-7MeW—K(NMeAc)-Pen(3)-AEF-2Nal-THP-K(NMeAc)—N-3Pya-Sar-CONH2;
[1403] cPEG3aCO-Pen(3)—N(N(Me)2)-T-7MeW—K(NMeAc)-Pen(3)-AEF-2Nal-THP-Q(N(Me)2)—N-3Pya-Sar-CONH2;
[1404] cPEG3aCO-Pen(3)—N(N(Me)2)-T-7MeW-Q(N(Me)2)-Pen(3)-AEF-2Nal-THP-Q(N(Me)2)—N-3Pya-Sar-CONH2;
[1405] mPEG3CO-SP6-Pen(3)—N(N(Me)2)-T-7MeW-Q(N(Me)2)-Pen(3)-AEF-2Nal-THP-Q(N(Me)2)—N-3Pya-Sar-CONH2;
[1406] CF3CO-Pen(3)—N(N(Me)2)-T-7MeW—K(NMeAc)-Pen(3)-AEF(N(Me)2)-2Nal-THP-Q(N(Me)2)—N-3Pya-Sar-CONH2;
[1407] mPEG3CO-SP6-Pen(3)—N(N(Me)2)-T-7MeW—K(NMeAc)-Pen(3)-AEF-2Nal-THP-QNMe2-N-3Pya-Sar-CONH2;
[1408] cPEG3aCO-Pen(3)—N(NMe2)-T-7MeW—K(NMeAc)-Pen(3)-AEF(NHCh)-2Nal-THP-K(NMeAc)—N-3Pya-Sar-CON(Me)2;
   [1409] or a pharmaceutically acceptable salt thereof.

[1410] In another aspect of the invention:

[1411] 10. The compound of aspect 3 wherein:
[1412] R⁹ is —NHCH₃, —N(CH₃)₂, —NH(CH₂CH₂O)₂CH₃, —N(CH₃)(CH₂CH₂O)₂CH₃, —NH(CH₂CH₂O)_{y}R^{s},

[chemical structure]

[1413] wherein:
   [1414] y is 2, 4, or 6;
   [1415] R^{s} is —CH₃, or

[chemical structure]

[1416] a pharmaceutically acceptable salt thereof.

[1417] In another aspect of the invention:

[1418] 11. A compound of Formula (IV):

[chemical structure]

[1419] wherein:
[1420] A is

[chemical structure]

[1421] wherein:
   [1422] R⁵ is —OCHF₂, —O(CH₂)₉CO₂H,

[chemical structure]

[1423] wherein:
   [1424] R^{h} is H, —CH₃, —C(O)CH₃, —C(NH)NH₂, —(CH₂)₃O(CH₂)₂OCH₃, —CH₂CH₂OCH₃, (CH₂CH₂O)₃CH₃, —(CH₂CH₂O)₆CH₃,

[chemical structure]

[1425] Rⁱ is H, —CH₃, —(CH₂)₃O(CH₂)₂OCH₃,

[chemical structure]

[1426] R^{j} is

[chemical structure]

[1427] q is 1, 2, 3, 4, or 5;
[1428] R^{k} is —OCH₃,

[chemical structure]

[1429] r is 3, 4, 5, 6, or 8;
[1430] wherein:
   [1431] R^{jj} is H, —(CH₂)₇CH₃, —(CH₂)₁₅CH₃, —(CH₂)₂OCH₃, or —(CH₂CH₂O)₃CH₃;
[1432] X3 is a direct bond, (D) arginine, (D) lysine substituted with R^{b},

[chemical structure]

[1433] wherein:
   [1434] R^{b} is

[chemical structure]

[1435] R² is H, —CH(CH₃)₂,

[chemical structure]

[1436] wherein
   [1437] R^{c} is H, or —CH₃;
   [1438] R^{c}′ is H, or —CH₃;
[1439] R^{d} is

[chemical structure]

[1440] R³ is H, —CH₃, —CF₃, or

[chemical structure]

[1441] R⁴ is H, or —CH₃;
[1442] X8

[chemical structure]

[1443] wherein:
   [1444] R^{e} is H, or —CH₃;
   [1445] R^{ee} is H;
   [1446] R^{f} is H, —CH₃, —C(CH₃)₃, —C(O)CH₃, —C(O)(CH₂CH₂O)₆CH₃, —(CH₂CH₂O)₆CH₃,

[chemical structure]

[1447] R^{g} is H, —OH, —C(O)NH₂, or —CH₂NHC(O)CH₃;
[1448] n is 0, or 1
[1449] X12 is absent,

[chemical structure]

[1450] R⁶ is —CH₃, —CH₂CH₂C(O)R^{m}, —(CH₂)ₛNRⁿR^{o},

[chemical structure]

[1451] R⁷ is H, or —CH₃;
[1452] wherein:
   [1453] R^{m} is —OH, or

[chemical structure]

[1454] Rⁿ is H, —CH₃, —CH₂CH(CH₃)₂, —C(O)CH₃, —C(O)(CH₂CH₂O)₆CH₃, —(CH₂CH₂O)₆CH₃, —C(O)(CH₂CH₂O)ₜCH₂CH₂R^{p},

[chemical structure]

[1455] R^{o} is H, —CH₃, or —C(O)CH₃;
   [1456] wherein:
      [1457] R^{p} is NHC(O)CH₃, or

[chemical structure]

[1458] s is 1, 2, or 4;
[1459] t is 2, 6, 9, or 12;
[1460] u is 2 or 3;
[1461] v is 10 or 12;
[1462] R⁸ is —CH₂CH₂CH₂NHC(O)CH₃, —C(O)NH₂, or —C(O)NHCH₃;
[1463] X15 is absent,

[chemical structure]

[1464] X16 is absent,

[chemical structure]

[1465] wherein:
   [1466] R^{q} is

[chemical structure]

[1467] R^{r} is H;
[1468] w is 2 4, or 5;
[1469] x is 2 or 4; and
[1470] R⁹ is —NH₂, —NHCH₃, —N(CH₃)₂, —NH(CH₂CH₂O)₂CH₃, —N(CH₃)(CH₂CH₂O)₂CH₃, —NH(CH₂CH₂O)_{y}R^{s},

[chemical structure]

[1471] wherein:
   [1472] y is 2, 4, or 6;
[1473] R^{s} is —CH₃, or

[chemical structure]

[1474] wherein:
   [1475] AN⁻as above defined for A, R, X3, X12, R1, R2, R5, R6, R8, R15, R16 and R^{a}, R^{b}, R^{d}, R^{f}, R^{h}, Rⁱ, R^{j}, R^{k}, R^{m}, R″, R^{o}, R^{s} is acetate, adipate, benzoate, benzenesulfonate, citrate, decanoate, chloride, lactate, maleate, methanesulfonate, oxalate, pivalate, propionate, succinate, sulfate, tartrate, or trifluoroacetate; or a pharmaceutically acceptable salt thereof.

[1476] In another aspect of the invention:

[1477] 12. The compound of aspect 11 wherein:
[1478] AN⁻is chloride;
[1479] or a pharmaceutically acceptable salt thereof.

[1480] In another aspect of the invention:

[1481] 13. The compound of aspect 11 selected from
[1482] cPEG3aCO-Pen(3)—N(N(Me)2)-T-7MeW—K(NMeAc)-Pen(3)-4DMPEF-2Nal-THP-K(NMeAc)—N-3Pya-Sar-CON(Me)2;
[1483] cPEG3aCO-Pen(3)—N(N(Me)2)-T-7MeW—K(NMeAc)-Pen(3)-4DMPzEF-2Nal-THP-K(NMeAc)—N-3Pya-Sar-CON(Me)2;
[1484] cPEG3aCO-Pen(3)—N(N(Me)2)-T-7MeW—K(NMeAc)-Pen(3)-ACHMF-2Nal-THP-K(NMeAc)—N-3Pya-Sar-CON(Me)2;
[1485] cPEG3aCO-Pen(3)—N(N(Me)2)-T-7MeW—K(NMeAc)-Pen(3)-ACHMF-2Nal-THP-K(NMeAc)—N-3Pya-Sar-CON(Me)2;
[1486] cPEG3aCO-Pen(3)—N-T-7MeW—K(Ac)-Pen(3)-AEF-2Nal-THP-E-N-3Pya-Sar-CONH2;
[1487] cPEG3aCO-Pen(3)—N-T-7MeW—K(Ac)-Pen(3)-AEF-2Nal-THP—K(Ac)—N-3Pya-Sar-CONH2;
[1488] cPEG3aCO-Pen(3)—N-T-7MeW-Q(N(Me)2)-Pen(3)-AEF-2Nal-THP-Q(N(Me)2)—N-3Pya-Sar-CONH2;
[1489] cPEG3aCO-Pen(3)—N-T-7MeW-Q(N(Me)2)-Pen(3)-AEF-2Nal-THP-Q(N(Me)2)—N-3Pya-Sar-CON(Me)2;
[1490] cPEG3aCO-Pen(3)—N-T-7MeW—K(NMeAc)-Pen(3)-AEF-2Nal-THP-E-N-3Pya-Sar-CONH2;
[1491] cPEG3aCO-Pen(3)—N-T-7MeW—K(NMeAc)-Pen(3)-AEF-2Nal-THP—K(Ac)—N-3Pya-Sar-CONH2;
[1492] cPEG3aCO-Pen(3)—N-T-7MeW—K(NMeAc)-Pen(3)-AEF-2Nal-THP-K(NMeAc)—N-3Pya-Sar-CONH2;
[1493] cPEG3aCO-Pen(3)—N-T-7MeW-Q(N(Me)2)-Pen(3)-AEF-2Nal-THP-K(NMeAc)—N-3Pya-Sar-CONH2;
[1494] cPEG3aCO-Pen(3)—N-T-7MeW—K(NMeAc)-Pen(3)-AEF-2Nal-THP-Dab(NMeAc)—N-3Pya-Sar-CONH2;
[1495] cPEG3aCO-Pen(3)—N-T-7MeW-Q(N(Me)2)-Pen(3)-AEF-2Nal-THP-Dab(NMeAc)—N-3Pya-Sar-CONH2;
[1496] cPEG3aCO-Pen(3)—N-T-7(3NAcPh)W—K(Ac)-Pen(3)-AEF-2Nal-THP-E-N-3Pya-Sar-CONH2;
[1497] cPEG3aCO-Pen(3)—N-T-7(3NAcPh)W—K(Ac)-Pen(3)-AEF-2Nal-THP—K(Ac)—N-3Pya-Sar-CONH2;
[1498] cPEG3aCO-r-Pen(3)—N-T-7MeW—K(Ac)-Pen(3)-AEF-2Nal-THP-E-N-5MePyridinAla-Sar-CONH2;
[1499] cPEG3aCO-Pen(3)—N(N(Me)2)-T-7MeW-Q(N(Me)2)-Pen(3)-AEF-2Nal-THP-Q(N(Me)2)—N-3Pya-Sar-CON(Me)2;
[1500] cPEG3aCO-Pen(3)—N(N(Me)2)-T-7MeW-AIB-Pen(3)-AEF-2Nal-THP-AIB-N-3Pya-Sar-CON(Me)2;
[1501] cPEG3aCO-Pen(3)—N(N(Me)2)-T-7MeW-Q(N(Me)2)-Pen(3)-AEF-2Nal-THP-Q(N(Me)2)—N-3Pya-Sar-CONH2;
[1502] cPEG3aCO-Pen(3)—N(N(Me)2)-T-7MeW—K(NMeAc)-Pen(3)-AEF-2Nal-THP—K(Ac)—N-3Pya-Sar-CONH2;
[1503] cPEG3aCO-Pen(3)—N(N(Me)2)-T-7MeW—K(NMeAc)-Pen(3)-AEF-2Nal-THP-Q(N(Me)2)—N-3Pya-Sar-CONH2;
[1504] cPEG3aCO-Pen(3)—N(N(Me)2)-T-7MeW-Q(N(Me)2)-Pen(3)-AEF-2Nal-THP-Dab(NMeAc)—N-3Pya-Sar-CON(Me)2;
[1505] cPEG3aCO-Pen(3)—N(N(Me)2)-T-7MeW-Dab(NMeAc)-Pen(3)-AEF-2Nal-THP-Dab(NMeAc)—N-3Pya-Sar-CON(Me)2;
[1506] cPEG3aCO-Pen(3)—N(N(Me)2)-T-7MeW—K(NMeAc)-Pen(3)-AEF-2Nal-THP-K(NMeAc)—N-3Pya-Sar-CONH2;
[1507] cPEG3aCO-Pen(3)—N(N(Me)2)-T-7MeW-Dab(NMeAc)-Pen(3)-AEF-2Nal-THP-K(NMeAc)—N-3Pya-Sar-CONH2;
[1508] cPEG3aCO-Pen(3)—N(N(Me)2)-T-7MeW-Dab(NMeAc)-Pen(3)-AEF-2Nal-THP-E-N-3Pya-Sar-CONH2;
[1509] cPEG3aCO-Pen(3)—N(N(Me)2)-T-7MeW—K(NMeAc)-Pen(3)-AEF-2Nal-THP-Dab(NMeAc)—N-3Pya-Sar-CON(Me)2;
[1510] cPEG3aCO-Pen(3)—N(N(Me)2)-T-7MeW—K(NMeAc)-Pen(3)-AEF-2Nal-diFCpx-Dab(NMeAc)—N-3Pya-Sar-CON(Me)2;
[1511] cPEG3aCO-Pen(3)—N(N(Me)2)-T-7MeW—K(NMeAc)-Pen(3)-AEF-2Nal-diFCpx-Dab(NMeAc)—N-3Pya-Sar-CON(Me)2;
[1512] cPEG3aCO-Pen(3)—N(N(Me)2)-T-7MeW-Dab(NMeAc)-Pen(3)-AEF-2Nal-THP-Dab(NMeAc)—N-3Pya-Sar-CONH(PEG3a);
[1513] cPEG3aCO-Pen(3)—N(N(Me)2)-T-7MeW-Dab(NMecPEG3a)-Pen(3)-AEF-2Nal-THP-Dab(NMeAc)—N-3Pya-Sar-CON(Me)2;
[1514] cPEG3aCO-Pen(3)—N(N(Me)2)-T-7MeW-APEG2Ser-Pen(3)-AEF-2Nal-THP-K(NMeAc)—N-3Pya-Sar-CON(Me)2;
[1515] cPEG3aCO-Pen(3)—N(N(Me)2)-T-7MeW-APEG2Ser(R*)-Pen(3)-AEF-2Nal-THP-K(NMeAc)—N-3Pya-Sar-CON(Me)2;
[1516] cPEG3aCO-Pen(3)—N(N(Me)2)-T-7MeW—K(NMeAc)-Pen(3)-AEF-2Nal-THP-K(NMeAc)—N-3Pya-Sar-CON(Me)2;
[1517] cPEG3aCO-Pen(3)—N(N(Me)2)-T-7MeW—K(NMeAc)-Pen(3)-AEF((Ch)cPEG3a)-2Nal-THP-K(NMeAc)—N-3Pya-Sar-CON(Me)2;
[1518] cPEG3aCO-Pen(3)—N(N(Me)2)-T-7MeW—K(NMeAc)-Pen(3)-AEF(AcCh)-2Nal-THP-K(NMeAc)—N-3Pya-Sar-CON(Me)2;
[1519] cPEG3aCO-Pen(3)—N(N(Me)2)-T-7MeW—K(NMeAc)-Pen(3)-AEF(aPEG2a)-2Nal-THP-K(NMeAc)—N-3Pya-Sar-CON(Me)2;
[1520] cPEG3aCO-Pen(3)—N(N(Me)2)-T-7MeW—K(NMeAc)-Pen(3)-AEF(BisMEP))-2Nal-THP-K(NMeAc)—N-3Pya-Sar-CON(Me)2;
[1521] cPEG3aCO-Pen(3)—N(N(Me)2)-T-7MeW—K(NMeAc)-Pen(3)-AEF(BisMEPa)-2Nal-THP-K(NMeAc)—N-3Pya-Sar-CON(Me)2;
[1522] cPEG3aCO-Pen(3)—N(N(Me)2)-T-7MeW—K(NMeAc)-Pen(3)-AEF(BisPEG2a)(RS)-2Nal-THP-K(NMeAc)—N-3Pya-Sar-CON(Me)2;
[1523] cPEG3aCO-Pen(3)—N(N(Me)2)-T-7MeW—K(NMeAc)-Pen(3)-AEF(BisPEG2a)(S*)-2Nal-THP-K(NMeAc)—N-3Pya-Sar-CON(Me)2;
[1524] cPEG3aCO-Pen(3)—N-T-7MeW—K(Ac)-Pen(3)-AEF(G)-2Nal-THP—K(Ac)—N-3Pya-Sar-CONH2;
[1525] cPEG3aCO-Pen(3)—N(N(Me)2)-T-7MeW—K(NMeAc)-Pen(3)-AEF(MePrpa)-2Nal-THP-K(NMeAc)—N-3Pya-Sar-CON(Me)2;
[1526] cPEG3aCO-Pen(3)—N(N(Me)2)-T-7MeW-Q(N(Me)2)-Pen(3)-AEF(N(Me)2)-2Nal-THP-Q(N(Me)2)—N-3Pya-Sar-CON(Me)2;
[1527] cPEG3aCO-Pen(3)—N(N(Me)2)-T-7MeW—K(NMeAc)-Pen(3)-AEF(N(Me)2)-2Nal-THP-K(NMeAc)—N-3Pya-Sar-CON(Me)2;
[1528] cPEG3aCO-Pen(3)—N(NMe2)-T-7MeW—K(NMeAc)-Pen(3)-AEF(NHCh)-2Nal-THP-K(NMeAc)—N-3Pya-Sar-CON(Me)2;
[1529] cPEG3aCO-Pen(3)—N(N(Me)2)-T-7MeW—K(NMeAc)-Pen(3)-AEF(NMe2mPEG3)-2Nal-THP-K(NMeAc)—N-3Pya-Sar-CON(Me)2;
[1530] cPEG3aCO-Pen(3)—N(N(Me)2)-T-7MeW—K(NMeAc)-Pen(3)-AEF(NMe3)-2Nal-THP-K(NMeAc)—N-3Pya-Sar-CON(Me)2;
[1531] cPEG3aCO-Pen(3)—N(N(Me)2)-T-7MeW—K(NMeAc)-Pen(3)-AEF(NMeBismPEG3)-2Nal-THP-K(NMeAc)—N-3Pya-Sar-CON(Me)2;
[1532] cPEG3aCO-Pen(3)—N(N(Me)2)-T-7MeW—K(NMeAc)-Pen(3)-AEF(NMePEG2a)-2Nal-THP-K(NMeAc)—N-3Pya-Sar-CON(Me)2;
[1533] cPEG3aCO-Pen(3)—N(N(Me)2)-T-7MeW—K(NMeAc)-Pen(3)-AEF(NsCh)-2Nal-THP-K(NMeAc)—N-3Pya-Sar-CON(Me)2;
[1534] cPEG3aCO-Pen(3)—N(N(Me)2)-T-7MeW—K(NMeAc)-Pen(3)-AEF(PEG2a)-2Nal-THP-K(NMeAc)—N-3Pya-Sar-CON(Me)2;
[1535] cPEG3aCO-Pen(3)—N(N(Me)2)-T-7MeW—K(NMeAc)-Pen(3)-AEF(SPD)-2Nal-THP-K(NMeAc)—N-3Pya-Sar-CON(Me)2;
[1536] cPEG3aCO-Pen(3)—N(N(Me)2)-T-7MeW—K(NMeAc)-Pen(3)-APEG2F-2Nal-THP-K(NMeAc)—N-3Pya-Sar-CON(Me)2;
[1537] cPEG3aCO-Pen(3)-A-T-7MeW-A-Pen(3)-APEG3F-2Nal-A-K(NMeAc)—N-3Pya-Sar-CON(Me)2;
[1538] cPEG3aCO-Pen(3)-APEG2Ser(S*)-T-7MeW—K(NMeAc)-Pen(3)-APEG3F-2Nal-THP-K(NMeAc)—N-3Pya-Sar-CON(Me)2;
[1539] cPEG3aCO-Pen(3)-Dab(Me)₃-T-7MeW—K(NMeAc)-Pen(3)-APEG3F-2Nal-THP-K(NMeAc)—N-3Pya-Sar-CON(Me)2;
[1540] cPEG3aCO-Pen(3)—F-T-7MeW—F-Pen(3)-APEG3F-2Nal-F—K(NMeAc)—N-3Pya-Sar-CON(Me)2;
[1541] cPEG3aCO-Pen(3)-Gab-T-7MeW—K(NMeAc)-Pen(3)-APEG3F-2Nal-THP-K(NMeAc)—N-3Pya-Sar-CON(Me)2;
[1542] cPEG3aCO-Pen(3)-L-T-7MeW-L-Pen(3)-APEG3F-2Nal-L-K(NMeAc)—N-3Pya-Sar-CON(Me)2;
[1543] cPEG3aCO-Pen(3)—N-T-7MeW—K(Ac)-Pen(3)-APEG3F-2Nal-THP—K(Ac)—N-3Pya-Sar-CONH2;
[1544] cPEG3aCO-Pen(3)—N-T-7MeW—K(NMeAc)-Pen(3)-APEG3F-2Nal-THP-K(NMeAc)—N-3Pya-Sar-CONH2;
[1545] cPEG3aCO-Pen(3)—N-T-7MeW—K(NMeAc)-Pen(3)-APEG3F-2Nal-THP-K(NMeAc)—N-3Pya-Sar-CON(Me)2;
[1546] cPEG3aCO-Pen(3)—N(N(Me)2)-T-7MeW—K(NMeAc)-Pen(3)-APEG3F-2Nal-THP-K(NMeAc)—N-3Pya-Sar-CON(Me)2;
[1547] cPEG3aCO-Pen(3)—N(N(Me)2)-T-7MeW—K(NMeAc)-Pen(3)-APEG3F-2Nal-THP-E-N-3Pya-Sar-CON(Me)2;
[1548] cPEG3aCO-Pen(3)—N(N(Me)2)-T-7MeW—K(NMeAc)-Pen(3)-APEG3F-2Nal-THP-Dab(NMeAc)—N-3Pya-Sar-CON(Me)2;
[1549] cPEG3aCO-Pen(3)—N(N(Me)2)-T-7MeW—K(NMeAc)-Pen(3)-APEG3F-2Nal-THP-Dab(NMeAc)—N-3Pya-Sar-CON(Me)2;
[1550] cPEG3aCO-Pen(3)—N(N(Me)2)-T-7MeW—K(NMeAc)-Pen(3)-APEG3F-2Nal-THP—K(Ac)—N-3Pya-Sar-CON(Me)2;
[1551] cPEG3aCO-Pen(3)—N(N(Me)2)-T-7MeW—K(Ac)-Pen(3)-APEG3F-2Nal-THP-K(NMeAc)—N-3Pya-Sar-CON(Me)2;
[1552] cPEG3aCO-Pen(3)—N(N(Me)2)-T-7MeW—K(NMeAc)-Pen(3)-APEG3F-2Nal-THP-K(NMeAc)—N-3Pya-Sar-CONH2;
[1553] cPEG3aCO-Pen(3)—N(N(Me)2)-T-7MeW—K(NMeAc)-Pen(3)-APEG3F-2Nal-THP-Dap(NMeAc)—N-3Pya-Sar-CON(Me)2;
[1554] cPEG3aCO-Pen(3)—N(N(Me)2)-T-7MeW—K(NMeAc)-Pen(3)-APEG3F-2Nal-THP-A-N-3Pya-Sar-CON(Me)2;
[1555] cPEG3aCO-Pen(3)—N(N(Me)2)-T-7MeW—K(NMeAc)-Pen(3)-APEG3F-2Nal-THP-L-N-3Pya-Sar-CON(Me)2;
[1556] cPEG3aCO-Pen(3)—N(N(Me)2)-T-7MeW—K(NMeAc)-Pen(3)-APEG3F-2Nal-THP—F—N-3Pya-Sar-CON(Me)2;
[1557] cPEG3aCO-Pen(3)—N(N(Me)2)-T-7MeW—K(NMeAc)-Pen(3)-APEG3F-2Nal-THP—W—N-3Pya-Sar-CON(Me)2;
[1558] cPEG3aCO-Pen(3)—W-T-7MeW—W-Pen(3)-APEG3F-2Nal-W—K(NMeAc)—N-3Pya-Sar-CON(Me)2;
[1559] cPEG3aCO-Pen(3)—N(N(Me)2)-T-7MeW—K(NMeAc)-Pen(3)-dFPPEG3F-2Nal-THP-K(NMeAc)—N-3Pya-Sar-CON(Me)2;
[1560] cPEG3aCO-Pen(3)—N(N(Me)2)-T-7MeW—K(NMeAc)-Pen(3)-Diazabiclyclooctane6F-2Nal-THP-K(NMeAc)—N-3Pya-Sar-CON(Me)2;
[1561] cPEG3aCO-Pen(3)—N(N(Me)2)-T-7MeW—K(NMeAc)-Pen(3)-DMMMF-2Nal-THP-K(NMeAc)—N-3Pya-Sar-CON(Me)2;
[1562] cPEG3aCO-Pen(3)—N(N(Me)2)-T-7MeW—K(NMeAc)-Pen(3)-DMPMF-2Nal-THP-K(NMeAc)—N-3Pya-Sar-CON(Me)2;
[1563] cPEG3aCO-Pen(3)—N(N(Me)2)-T-7MeW—K(NMeAc)-Pen(3)-DMTASF-2Nal-THP-K(NMeAc)—N-3Pya-Sar-CON(Me)2;
[1564] cPEG3aCO-Pen(3)—N(N(Me)2)-T-7MeW—K(NMeAc)-Pen(3)—F(4G)-2Nal-THP-K(NMeAc)—N-3Pya-Sar-CON(Me)2;
[1565] cPEG3aCO-Pen(3)—N-T-7MeW—K(Ac)-Pen(3)—F(4N3)-2Nal-THP—K(Ac)—N-3Pya-Sar-CONH2;
[1566] cPEG3aCO-Pen(3)—N(N(Me)2)-T-7MeW—K(NMeAc)-Pen(3)—F(4N3)-2Nal-THP-K(NMeAc)—N-3Pya-Sar-CON(Me)2;
[1567] cPEG3aCO-Pen(3)—N(N(Me)2)-T-7MeW—K(NMeAc)-Pen(3)—F(4Tz1DMA4mPEG)-2Nal-THP-K(NMeAc)—N-3Pya-Sar-CON(Me)2;
[1568] cPEG3aCO-Pen(3)—N(N(Me)2)-T-7MeW—K(NMeAc)-Pen(3)—F(4Tz1MME)-2Nal-THP-K(NMeAc)—N-3Pya-Sar-CON(Me)2;
[1569] cPEG3aCO-Pen(3)—N-T-7MeW—K(Ac)-Pen(3)—F(4Tz1MMo3)-2Nal-THP—K(Ac)—N-3Pya-Sar-CONH2;
[1570] cPEG3aCO-Pen(3)—N(N(Me)2)-T-7MeW—K(NMeAc)-Pen(3)—F(4Tz1MMo4)-2Nal-THP-K(NMeAc)—N-3Pya-Sar-CON(Me)2;
[1571] cPEG3aCO-Pen(3)—N-T-7MeW—K(Ac)-Pen(3)—F(4Tz1TMA1)-2Nal-THP—K(Ac)—N-3Pya-Sar-CONH2;
[1572] cPEG3aCO-Pen(3)—N(N(Me)2)-T-7MeW—K(NMeAc)-Pen(3)—F(4Tz1TMA1)-2Nal-THP-K(NMeAc)—N-3Pya-Sar-CON(Me)2;
[1573] cPEG3aCO-Pen(3)—N(N(Me)2)-T-7MeW—K(NMeAc)-Pen(3)—F(4Tz1TMA2)-2Nal-THP-K(NMeAc)—N-3Pya-Sar-CON(Me)2;
[1574] cPEG3aCO-Pen(3)—N-T-7MeW—K(Ac)-Pen(3)—F(4Tz1TMA3)-2Nal-THP—K(Ac)—N-3Pya-Sar-CONH2;
[1575] cPEG3aCO-Pen(3)—N(N(Me)2)-T-7MeW—K(NMeAc)-Pen(3)—F(4Tz1TMA3)-2Nal-THP-K(NMeAc)—N-3Pya-Sar-CON(Me)2;
[1576] cPEG3aCO-Pen(3)—N-T-7MeW—K(Ac)-Pen(3)—F(4Tz1TMA4)-2Nal-THP—K(Ac)—N-3Pya-Sar-CONH2;
[1577] cPEG3aCO-Pen(3)—N(N(Me)2)-T-7MeW—K(NMeAc)-Pen(3)—F(4Tz1TMA4)-2Nal-THP-K(NMeAc)—N-3Pya-Sar-CON(Me)2;
[1578] cPEG3aCO-Pen(3)—N(N(Me)2)-T-7MeW—K(NMeAc)-Pen(3)—F(4Tz1TMA5)-2Nal-THP-K(NMeAc)—N-3Pya-Sar-CON(Me)2;
[1579] cPEG3aCO-Pen(3)—N(N(Me)2)-T-7MeW—K(NMeAc)-Pen(3)-GPEG3F-2Nal-THP-K(NMeAc)—N-3Pya-Sar-CON(Me)2;
[1580] cPEG3aCO-Pen(3)—N(N(Me)2)-T-7MeW—K(NMeAc)-Pen(3)-hFTMAPF-2Nal-THIP-K(NMeAc)—N-3Pya-Sar-CON(Me)2;
[1581] cPEG3aCO-Pen(3)—N(N(Me)2)-T-7MeW—K(NMeAc)-Pen(3)-MMoEF-2Nal-THP-K(NMeAc)—N-3Pya-Sar-CON(Me)2;
[1582] cPEG3aCO-Pen(3)—N(N(Me)2)-T-7(3NAcPh)W—K(NMeAc)-Pen(3)-MMoEF-2Nal-THP-K(NMeAc)—N-3Pya-Sar-CON(Me)2;
[1583] cPEG3aCO-Pen(3)—N(N(Me)2)-T-7MeW—K(NMeAc)-Pen(3)-MMoPF-2Nal-THIP-K(NMeAc)—N-3Pya-Sar-CON(Me)2;
[1584] cPEG3aCO-Pen(3)—N(N(Me)2)-T-7MeW—K(NMeAc)-Pen(3)-MMPEG3F-2Nal-THIP-K(NMeAc)—N-3Pya-Sar-CON(Me)2;
[1585] cPEG3aCO-Pen(3)—N(N(Me)2)-T-7MeW—K(NMeAc)-Pen(3)-morfTMA4F-2Nal-THIP-K(NMeAc)—N-3Pya-Sar-CON(Me)2;
[1586] cPEG3aCO-Pen(3)—N(N(Me)2)-T-7MeW—K(NMeAc)-Pen(3)-mPEG2TMA2F-2Nal-THIP-K(NMeAc)—N-3Pya-Sar-CON(Me)2;
[1587] cPEG3aCO-Pen(3)—N(N(Me)2)-T-7MeW—K(NMeAc)-Pen(3)-mPEG2TMA4F-2Nal-THIP-K(NMeAc)—N-3Pya-Sar-CON(Me)2;
[1588] cPEG3aCO-Pen(3)—N(N(Me)2)-T-7MeW—K(NMeAc)-Pen(3)-mPEG3 TMA4F-2Nal-THP-K(NMeAc)—N-3Pya-Sar-CON(Me)2;
[1589] cPEG3aCO-Pen(3)—N(N(Me)2)-T-7MeW—K(NMeAc)-Pen(3)-MPzPEG3F-2Nal-THIP-K(NMeAc)—N-3Pya-Sar-CON(Me)2;
[1590] cPEG3aCO-Pen(3)—N(N(Me)2)-T-7MeW—K(NMeAc)-Pen(3)-MTASF-2Nal-THP-K(NMeAc)—N-3Pya-Sar-CON(Me)2;
[1591] cPEG3aCO-Pen(3)—N(N(Me)2)-T-7MeW—K(NMeAc)-Pen(3)-NPyEF-2Nal-THIP-K(NMeAc)—N-3Pya-Sar-CON(Me)2;
[1592] cPEG3aCO-Pen(3)—N(N(Me)2)-T-7MeW—K(NMeAc)-Pen(3)-NPyPEG3F-2Nal-THIP-K(NMeAc)—N-3Pya-Sar-CON(Me)2;
[1593] cPEG3aCO-Pen(3)—N(N(Me)2)-T-7MeW—K(NMeAc)-Pen(3)-PiperazinequatF-2Nal-THP-K(NMeAc)—N-3Pya-Sar-CON(Me)2;
[1594] cPEG3aCO-Pen(3)—N(N(Me)2)-T-7MeW—K(NMeAc)-Pen(3)-TBAPEG3F-2Nal-THP-K(NMeAc)—N-3Pya-Sar-CON(Me)2;
[1595] cPEG3aCO-Pen(3)—N(N(Me)2)-T-7MeW—K(NMeAc)-Pen(3)-TMA3F-2Nal-THP-K(NMeAc)—N-3Pya-Sar-CON(Me)2;
[1596] cPEG3aCO-Pen(3)—N(N(Me)2)-T-7MeW—K(NMeAc)-Pen(3)-TMA3F-2Nal-THP-K(NMeAc)—N-3Pya-Sar-CON(Me)2;
[1597] cPEG3aCO-Pen(3)—N(N(Me)2)-T-7MeW—K(NMeAc)-Pen(3)-TMA4F-2Nal-THP-K(NMeAc)—N-3Pya-Sar-CON(Me)2;
[1598] cPEG3aCO-Pen(3)—N(N(Me)2)-T-7MeW—K(NMeAc)-Pen(3)-TMA6F-2Nal-THP-K(NMeAc)—N-3Pya-Sar-CON(Me)2;
[1599] cPEG3aCO-Pen(3)—N(N(Me)2)-T-7MeW—K(NMeAc)-Pen(3)-TMA8F-2Nal-THP-K(NMeAc)—N-3Pya-Sar-CON(Me)2;
[1600] cPEG3aCO-Pen(3)—K(cPEG3a)-T-7MeW—K(NMeAc)-Pen(3)-TMAPF-2Nal-THP-K(NMeAc)—N-3Pya-Sar-CON(Me)2;
[1601] cPEG3aCO-Pen(3)—K(Me)₃-T-7MeW—K(NMeAc)-Pen(3)-TMAPF-2Nal-THP-K(NMeAc)—N-3Pya-Sar-CON(Me)2;
[1602] cPEG3aCO-Pen(3)—K(Me)₃-T-7MeW—K(NMeAc)-Pen(3)-TMAPF-2Nal-Achx-K(NMeAc)—N-3Pya-Sar-CON(Me)2;
[1603] cPEG3aCO-Pen(3)—K(PEG2PEG2gEC12)-T-7MeW—K(Ac)-Pen(3)-TMAPF-2Nal-THP-K(NMeAc)—N-3Pya-NMeK(PEG2PEG2gEC12)—CONH2;
[1604] cPEG3aCO-k(PEG2PEG2gEC12)-Pen(3)—K(PEG2PEG2gEC12)-T-7MeW—K(NMeAc)-Pen(3)-TMAPF-2Nal-THP-K(NMeAc)—N-3Pya-Sar-CON(Me)2;
[1605] cPEG3aCO-Pen(3)—K(PEG2PEG2gEC12)-T-7MeW—K(NMeAc)-Pen(3)-TMAPF-2Nal-THP-K(NMeAc)—N-3Pya-Sar-CON(Me)2;
[1606] cPEG3aCO-Pen(3)—K(PEG2PEG2gEC12)-T-7MeW—K(PEG2PEG2gEC12)-Pen(3)-TMAPF-2Nal-THP-K(NMeAc)—N-3Pya-Sar-CON(Me)2;
[1607] cPEG3aCO-Pen(3)—K(PEG2PEG2gEC12)-T-7MeW—K(NMeAc)-Pen(3)-TMAPF-2Nal-THP-K(PEG2PEG2gEC12)—N-3Pya-Sar-CON(Me)2;
[1608] cPEG3aCO-Pen(3)—K(PEG2PEG2gEC14)-T-7MeW—K(Ac)-Pen(3)-TMAPF-2Nal-THP-K(NMeAc)—N-3Pya-NMeK(PEG2PEG2gEC14)—CONH2;
[1609] cPEG3aCO-k(PEG2PEG2gEC14)-Pen(3)—K(PEG2PEG2gEC14)-T-7MeW—K(NMeAc)-Pen(3)-TMAPF-2Nal-THP-K(NMeAc)—N-3Pya-Sar-CON(Me)2;
[1610] cPEG3aCO-Pen(3)—K(PEG2PEG2gEC14)-T-7MeW—K(NMeAc)-Pen(3)-TMAPF-2Nal-THP-K(NMeAc)—N-3Pya-Sar-CON(Me)2;
[1611] cPEG3aCO-Pen(3)—K(PEG2PEG2gEC14)-T-7MeW—K(PEG2PEG2gEC14)-Pen(3)-TMAPF-2Nal-THP-K(NMeAc)—N-3Pya-Sar-CON(Me)2;
[1612] cPEG3aCO-Pen(3)—K(PEG2PEG2gEC14)-T-7MeW—K(NMeAc)-Pen(3)-TMAPF-2Nal-THP-K(PEG2PEG2gEC14)—N-3Pya-Sar-CON(Me)2;
[1613] cPEG3aCO-Pen(3)—N-T-7MeW—K(NMeAc)-Pen(3)-TMAPF-2Nal-THP-K(NMeAc)—N-3Pya-Sar-CONH2;
[1614] cPEG3aCO-Pen(3)—N-T-7MeW—K(NMeAc)-Pen(3)-TMAPF-2Nal-THP-K(NMeAc)—N-3Pya-Sar-CON(Me)2;
[1615] cPEG3aCO-Pen(3)—N-T-7MeW—K(NMeAC)-Pen(3)-TMAPF-2Nal-THP-Dab(NMeAc)—N-3Pya-Sar-CON(Me)2;
[1616] cPEG3aCO-Pen(3)—N-T-7MeW-Dab(NMeAc)-Pen(3)-TMAPF-2Nal-THP-K(NMeAC)—N-3Pya-Sar-CON(Me)2;
[1617] cPEG3aCO-Pen(3)—N-T-7MeW—K(Ac)-Pen(3)-TMAPF-2Nal-THP-A-N-3Pya-Sar-CON(Me)2;
[1618] cPEG3aCO-Pen(3)—N-T-7MeW—K(Ac)-Pen(3)-TMAPF-2Nal-THP-K(PEG2PEG2gEC12)—N-3Pya-NMeK(PEG2PEG2gEC12)—CONH2;
[1619] cPEG3aCO-Pen(3)—N-T-7MeW—K(Ac)-Pen(3)-TMAPF-2Nal-THP-K(NMeAc)—N-3Pya-NMeK(PEG2PEG2gEC12)—CONH2;
[1620] cPEG3aCO-Pen(3)—N-T-7MeW—K(Ac)-Pen(3)-TMAPF-2Nal-THP-E-N-3Pya-Sar-CONH2;
[1621] cPEG3aCO-Pen(3)—N-T-7MeW—K(Ac)-Pen(3)-TMAPF-2Nal-THP—K(Ac)—N-3Pya-Sar-CONH2;
[1622] cPEG3aCO-Pen(3)—N-T-7(3NAcPh)W—K(Ac)-Pen(3)-TMAPF-2Nal-THP-E-N-3Pya-Sar-CONH2;
[1623] cPEG3aCO-Pen(3)—N(N(Me))-T-7MeW—K(NMeAc)-Pen(3)-TMAPF-2Nal-THP-K(NMeAc)—N-3Pya-Sar-CON(Me)2;
[1624] cPEG3aCO-Pen(3)—N(N(Me)2)-T-7MeW—K(NMeAc)-Pen(3)-TMAPF-2Nal-THP-K(NMeAc)—N-3Pya-Sar-CON(Me)2;
[1625] cPEG3aCO-Pen(3)—N(N(Me)2)-T-7MeW—K(NMeAc)-Pen(3)-TMAPF-2Nal-THP-E-N-3Pya-Sar-CON(Me)2;
[1626] cPEG3aCO-Pen(3)—N(N(Me)2)-T-7MeW—K(NMeAc)-Pen(3)-TMAPF-2Nal-THP-K(NMeAc)—N-3Pya-Sar-CO(NHPEG3a);
[1627] cPEG3aCO-Pen(3)—N(N(Me)2)-T-7MeW-APEG2Ser(S*)-Pen(3)-TMAPF-2Nal-THP-K(NMeAc)—N-3Pya-Sar-CON(Me)2;
[1628] cPEG3aCO-Pen(3)—N(N(Me)2)-T-7MeW-APEG2Ser(R*)-Pen(3)-TMAPF-2Nal-THP-K(NMeAc)—N-3Pya-Sar-CON(Me)2;
[1629] cPEG3aCO-Pen(3)—N(N(Me)2)-T-7(3NAcPh)W—K(NMeAc)-Pen(3)-TMAPF-2Nal-THP-K(NMeAc)—N-3Pya-Sar-CON(Me)2;
[1630] cPEG3aCO-Pen(3)—N(N(Me)2)-T-7MeW—K(NMeAC)-Pen(3)-TMAPF-2Nal-THP-Dab(NMeAc)—N-3Pya-Sar-CON(Me)2;
[1631] cPEG3aCO-Pen(3)—N(N(Me)2)-T-7MeW—K(NMeAC)-Pen(3)-TMAPF-2Nal-THP-K(NMeAC)—N-3Pya-NMeK(PEG2PEG2C12)—CONH2;
[1632] cPEG3aCO-Pen(3)—N(N(Me)2)-T-7MeW—K(Ac)-Pen(3)-TMAPF-2Nal-THP-Dab(NMeAc)—N-3Pya-Sar-CON(Me)2;
[1633] cPEG3aCO-Pen(3)—N(N(Me)2)-T-7MeW—K(NMeAC)-Pen(3)-TMAPF-2Nal-THP-Q(N(Me)2)—N-3Pya-Sar-CON(Me)2;
[1634] cPEG3aCO-Pen(3)—N(N(Me)2)-T-7MeW-Q(N(Me)2)-Pen(3)-TMAPF-2Nal-THP-K(NMeAC)—N-3Pya-Sar-CON(Me)2;
[1635] cPEG3aCO-Pen(3)—N(N(Me)2)-T-7MeW—K(Ac)-Pen(3)-TMAPF-2Nal-THP-K(NMeAC)—N-3Pya-NMeK(PEG2PEG2gEC12)—CONH2;
[1636] cPEG3aCO-Pen(3)—N(N(Me)2)-T-7MeW—K(NMeAC)-Pen(3)-TMAPF-2Nal-THP-K(NMeAC)—N-3Pya-NMeK(PEG2PEG2gEC12)—CONH2;
[1637] cPEG3aCO-Pen(3)—N(N(Me)2)-T-7MeW—K(NMeAC)-Pen(3)-TMAPF-2Nal-THP-K(NMeAC)—N-3Pya-NMeK(PEG2PEG2gEC14)—CONH2;
[1638] cPEG3aCO-Pen(3)—N(N(Me)2)-T-7MeW—K(NMeAc)-Pen(3)-TMAPF-2Nal-THP-A-N-3Pya-Sar-CON(Me)2;
[1639] cPEG3aCO-Pen(3)—N(N(Me)2)-T-7MeW—K(NMeAc)-Pen(3)-TMAPF-2Nal-THP-K(NMeAc)—N-3Pya-Sar-CONH2;
[1640] cPEG3aCO-Pen(3)—N(N(Me)2)-T-7MeW—K(NMeAc)-Pen(3)-TMAPF-2Nal-THP-Cit-N-3Pya-Sar-CON(Me)2;
[1641] cPEG3aCO-Pen(3)—N(N(Me)2)-T-7MeW—K(Me)₃-Pen(3)-TMAPF-2Nal-THP-K(NMeAc)—N-3Pya-Sar-CON(Me)2;
[1642] cPEG3aCO-Pen(3)—N(N(Me)2)-T-7MeW—K(NMeAc)-Pen(3)-TMAPF-2Nal-Acpx-K(NMeAc)—N-3Pya-Sar-CON(Me)2;
[1643] cPEG3aCO-Pen(3)—N(N(Me)2)-T-7MeW—K(NMeAc)-Pen(3)-TMAPF-2Nal-Achx-K(NMeAc)—N-3Pya-Sar-CON(Me)2;
[1644] cPEG3aCO-Pen(3)—N(N(Me)2)-T-7MeW—K(NMeAc)-Pen(3)-TMAPF-2Nal-Chg-K(NMeAc)—N-3Pya-Sar-CON(Me)2;
[1645] cPEG3aCO-Pen(3)—N(N(Me)2)-T-7MeW—K(NMeAc)-Pen(3)-TMAPF-2Nal-Aib-K(NMeAc)—N-3Pya-Sar-CON(Me)2;
[1646] cPEG3aCO-Pen(3)—N(N(Me)2)-T-7MeW-Cit-Pen(3)-TMAPF-2Nal-THP-K(NMeAc)—N-3Pya-Sar-CON(Me)2;
[1647] cPEG3aCO-k(PEG2PEG2gEC14)-Pen(3)—N(N(Me)2)-T-7MeW—K(Ac)-Pen(3)-TMAPF-2Nal-THP-K(NMeAc)—N-3Pya-NMeK(PEG2PEG2gEC14)—CONH2;
[1648] cPEG3aCO-k(PEG2PEG2gEC12)-Pen(3)—N(N(Me)2)-T-7MeW—K(Ac)-Pen(3)-TMAPF-2Nal-THP-K(NMeAc)—N-3Pya-NMeK(PEG2PEG2gEC12)—CONH2;
[1649] cPEG3aCO-Pen(3)—N(N(Me)2)-T-7MeW—K(Ac)-Pen(3)-TMAPF-2Nal-THP-K(PEG2PEG2gEC14)—N-3Pya-NMeK(PEG2PEG2gEC14)—CONH2;
[1650] cPEG3aCO-Pen(3)—N(N(Me)2)-T-7MeW—K(PEG2PEG2gEC12)-Pen(3)-TMAPF-2Nal-THP-K(NMeAc)—N-3Pya-NMeK(PEG2PEG2gEC12)—CONH2;
[1651] cPEG3aCO-Pen(3)—N(N(Me)2)-T-7MeW—K(Ac)-Pen(3)-TMAPF-2Nal-THP-K(PEG2PEG2gEC12)—N-3Pya-NMeK(PEG2PEG2gEC12)—CONH2;
[1652] cPEG3aCO-Pen(3)—N(N(Me)2)-T-7MeW—K(PEG2PEG2gEC14)-Pen(3)-TMAPF-2Nal-THP-K(NMeAc)—N-3Pya-NMeK(PEG2PEG2gEC14)—CONH2;
[1653] cPEG3aCO-Pen(3)—N(N(Me)2)-T-7MeW-Dab(NMeAc)-Pen(3)-TMAPF-2Nal-THP-K(NMeAc)—N-3Pya-Sar-CON(Me)2;
[1654] cPEG3aCO-Pen(3)—N(N(Me)2)-T-7MeW—K(Ac)-Pen(3)-TMAPF-2Nal-THP-K(NMeAc)—N-3Pya-NMeK(PEG2PEG2C14)—CONH2;
[1655] cPEG3aCO-Pen(3)—N(N(Me)2)-T-7MeW—K(Ac)-Pen(3)-TMAPF-2Nal-THP-K(NMeAc)—N-3Pya-NMeK(PEG2PEG6gEC12)—CONH2;
[1656] cPEG3aCO-Pen(3)—N(N(Me)2)-T-7MeW—K(Ac)-Pen(3)-TMAPF-2Nal-THP-K(NMeAc)—N-3Pya-NMeK(PEG2PEG6gEC14)—CONH2;
[1657] cPEG3aCO-Pen(3)—N(N(Me)2)-T-7MeW-Dab(NMeAc)-Pen(3)-TMAPF-2Nal-THP-K(NMeAc)—N-3Pya-Sar-CONH2;
[1658] cPEG3aCO-k(PEG2PEG6gEC12)-Pen(3)—N(N(Me)2)-T-7MeW—K(Ac)-Pen(3)-TMAPF-2Nal-THP-K(NMeAc)—N-3Pya-NMeK(PEG2PEG6gEC12)—CONH2;
[1659] cPEG3aCO-Pen(3)—N(N(Me)2)-T-7MeW—K(Ac)-Pen(3)-TMAPF-2Nal-THP-K(NMeAc)—N-3Pya-NMeK(PEG2PEG2K(PEG2PEG2gEC12)₂)—CONH2;
[1660] cPEG3aCO-Pen(3)—N(N(Me)2)-T-7MeW—K(Ac)-Pen(3)-TMAPF-2Nal-THP-K(PEG2PEG2PEG2gEC12))—N-3Pya-NMeK(PEG2PEG2PEG2gEC12)—CONH2;
[1661] cPEG3aCO-k(PEG2PEG2gEC12)-Pen(3)—N(N(Me)2)-T-7MeW—K(NMeAc)-Pen(3)-TMAPF-2Nal-THP-K(NMeAc)—N-3Pya-Sar-CON(Me)2;
[1662] cPEG3aCO-k(PEG2PEG2gEC14)-Pen(3)—N(N(Me)2)-T-7MeW—K(NMeAc)-Pen(3)-TMAPF-2Nal-THP-K(NMeAc)—N-3Pya-Sar-CON(Me)2;
[1663] cPEG3aCO-k(PEG2PEG2gEC12)-Pen(3)—N(N(Me)2)-T-7MeW—K(PEG2PEG2gEC12)-Pen(3)-TMAPF-2Nal-THP-K(NMeAc)—N-3Pya-Sar-CON(Me)2;
[1664] cPEG3aCO-Pen(3)—N(N(Me)2)-T-7MeW—K(cPEG3a)-Pen(3)-TMAPF-2Nal-THP-K(NMeAc)—N-3Pya-Sar-CON(Me)2;
[1665] cPEG3aCO-Pen(3)—N(N(Me)2)-T-7MeW—K(4cpg)-Pen(3)-TMAPF-2Nal-THP-K(NMeAc)—N-3Pya-Sar-CON(Me)2;
[1666] cPEG3aCO-k(PEG2PEG2gEC12)-Pen(3)—N(N(Me)2)-T-7MeW—K(NMeAc)-Pen(3)-TMAPF-2Nal-THP-K(PEG2PEG2gEC12)—N-3Pya-Sar-CON(Me)2;
[1667] cPEG3aCO-k(PEG2PEG2gEC14)-Pen(3)—N(N(Me)2)-T-7MeW—K(NMeAc)-Pen(3)-TMAPF-2Nal-THP-K(PEG2PEG2gEC14)—N-3Pya-Sar-CON(Me)2;
[1668] cPEG3aCO-Pen(3)—N(N(Me)2)-T-7MeW—K(PEG2PEG2gEC14)-Pen(3)-TMAPF-2Nal-THP-K(NMeAc)—N-3Pya-Sar-CON(Me)2;
[1669] cPEG3aCO-Pen(3)—N(N(Me)2)-T-7MeW—K(PEG2PEG2gEC12)-Pen(3)-TMAPF-2Nal-THP-K(PEG2PEG2gEC12)—N-3Pya-Sar-CON(Me)2;
[1670] cPEG3aCO-Pen(3)—N(N(Me)2)-T-7MeW—K(NMeAc)-Pen(3)-TMAPF-2Nal-THP-K(PEG2PEG2gEC12)—N-3Pya-Sar-CON(Me)2;
[1671] cPEG3aCO-Pen(3)—N(N(Me)2)-T-7MeW—K(NMeAc)-Pen(3)-TMAPF-2Nal-THP-K(PEG2PEG2gEC14)—N-3Pya-Sar-CON(Me)2;
[1672] cPEG3aCO-k(PEG2PEG2PEG2PEG2gEC12)-Pen(3)—N(N(Me)2)-T-7MeW—K(Ac)-Pen(3)-TMAPF-2Nal-THP-K(NMeAc)—N-3Pya-NMeK(PEG2PEG2PEG2PEG2gEC12)—CONH2;
[1673] cPEG3aCO-Pen(3)—N(N(Me)2)-T-7MeW—K(Ac)-Pen(3)-TMAPF-2Nal-THP-K(NMeAc)—N-3Pya-NMeK(SP6PEG2PEG2C12)—CONH2;
[1674] cPEG3aCO-Pen(3)—N(N(Me)2)-T-7MeW—K(Ac)-Pen(3)-TMAPF-2Nal-THP-K(NMeAc)—N-3Pya-NMeK(SP6PEG2PEG2gEC12)—CONH2;
[1675] cPEG3aCO-Pen(3)—N(N(Me)2)-T-7MeW—K(Ac)-Pen(3)-TMAPF-2Nal-THP-K(NMeAc)—N-3Pya-NMeK(PEG2PEG2K(PEG2PEG2PEG2PEG2gEC12)₂)—CONH2;
[1676] cPEG3aCO-Pen(3)—N(N(Me)2)-T-7MeW—K(PEG2PEG2gEC14)-Pen(3)-TMAPF-2Nal-THP-K(PEG2PEG2gEC14)—N-3Pya-Sar-CON(Me)2;
[1677] cPEG3aCO-Pen(3)—N(N(Me)2)-T-7MeW-Dap(NMeAc)-Pen(3)-TMAPF-2Nal-THP-K(NMeAc)—N-3Pya-Sar-CON(Me)2;
[1678] cPEG3aCO-Pen(3)—N(N(Me)2)-T-7MeW—K(Ac)-Pen(3)-TMAPF-2Nal-THP-Dap(NMeAc)—N-3Pya-Sar-CON(Me)2;
[1679] cPEG3aCO-Pen(3)—N(N(Me)2)-T-7MeW—K(NMeAc)-Pen(3)-Tzl(Ch)-2Nal-THP-K(NMeAc)—N-3Pya-Sar-CON(Me)2;
[1680] cPEG3aCO-Pen(3)—N(N(Me)2)-T-7MeW—K(NMeAc)-Pen(3)-TzlChmPEG-2Nal-THP-K(NMeAc)—N-3Pya-Sar-CON(Me)2;
[1681] cPEG3aCO-Pen(3)—N(N(Me)2)-T-7MeW—K(NMeAc)-Pen(3)-TzlChmPEG3-2Nal-THP-K(NMeAc)—N-3Pya-Sar-CON(Me)2;
[1682] cPEG3aCO-Pen(3)—N(N(Me)2)-T-7MeW—K(NMeAc)-Pen(3)—Y(C9OH)-2Nal-THP-K(NMeAc)—N-3Pya-Sar-CON(Me)2;
[1683] cPEG3aCO-Pen(3)—N(N(Me)2)-T-7MeW—K(NMeAc)-Pen(3)—Y(OEOXIMECh)-2Nal-THP-K(NMeAc)—N-3Pya-Sar-CON(Me)2;
[1684] cPEG3aCO-Pen(3)—N(N(Me)2)-T-7MeW—K(NMeAc)-Pen(3)—Y(OTzlCh)-2Nal-THP-K(NMeAc)—N-3Pya-Sar-CON(Me)2;
[1685] cPEG3aCO-Pen(3)—N(N(Me)2)-T-7MeW—K(NMeAc)-Pen(3)—Y(OTzlChC16)-2Nal-THP-K(NMeAc)—N-3Pya-Sar-CON(Me)2;
[1686] cPEG3aCO-Pen(3)—N(N(Me)2)-T-7MeW—K(NMeAc)-Pen(3)—Y(OTzlC1aC8)-2Nal-THP-K(NMeAc)—N-3Pya-Sar-CON(Me)2;
[1687] cPEG3aCO-Pen(3)—N(N(Me)2)-T-7MeW—K(NMeAc)-Pen(3)—Y(OTzlChmPEG)-2Nal-THP-K(NMeAc)—N-3Pya-Sar-CON(Me)2;
[1688] cPEG3aCO-Pen(3)—N(N(Me)2)-T-7MeW—K(NMeAc)-Pen(3)—Y(OTzlChmPEG3)-2Nal-THP-K(NMeAc)—N-3Pya-Sar-CON(Me)2;
[1689] cPEG3aCO-Pen(3)—N(N(Me)2)-T-7MeW—K(NMeAc)-Pen(3)—Y(OTz1TMA4)-2Nal-THP-K(NMeAc)—N-3Pya-Sar-CON(Me)2;
[1690] cPEG3aCO-Pen(3)—N(N(Me)2)-T-7MeW—K(NMeAc)-Pen(3)—Y(OTz1TMA4)-2Nal-THP-K(NMeAc)—N-3Pya-Sar-CON(Me)2;
[1691] cPEG3aCO-Pen(3)—N(N(Me)2)-T-7MeW—K(NMeAc)-Pen(3)—Y(OZOXIMECh)-2Nal-THP-K(NMeAc)—N-3Pya-Sar-CON(Me)2;
[1692] cPEG3aCO-Pen(3)—N(N(Me)2)-T-7MeW—K(NMeAc)-Pen(3)—YC8CO(NHPEG3a)-2Nal-THP-K(NMeAc)—N-3Pya-Sar-CON(Me)2;
[1693] cPEG3aCO-Pen(3)—N(N(Me)2)-T-7MeW—K(NMeAc)-Pen(3)-YC8COPip-2Nal-THP-K(NMeAc)—N-3Pya-Sar-CON(Me)2;
[1694] cPEG3gCO-Pen(3)—N(N(Me)2)-T-7MeW—K(NMeAc)-Pen(3)-APEG3F-2Nal-THP-K(NMeAc)—N-3Pya-Sar-CON(Me)2;
[1695] cPEG3gCO-Pen(3)—N(N(Me)2)-T-7MeW—K(NMeAc)-Pen(3)-TMAPF-2Nal-THP-K(NMeAc)—N-3Pya-Sar-CON(Me)2;
   [1696] or a pharmaceutically acceptable salt thereof.

[1697] In another aspect of the invention:

[1698] 14. A compound of Formula (V)

[chemical structure]

wherein:
[1699] R¹ is —C(O)C(1-2)alkyl, —C(O)CF₃, —COCH₂CF₃, —CO(CH₂)₅N(CH₃)₃+AN⁻, —CH₂CH₂NHC(O)CH₂O(CH₂CH₂O)₂CH₃, —CH₂CH₂NHC(O)(CH₂CH₂O)₆CH₃,

[chemical structure]

[1700] wherein:
[1701] R^{a} is

[chemical structure]

—CH₂CH₂OCH₂CH₂N(CH₃)₂,
[1702] —(CH₂CH₂O)₃CH₂CH₂N(CH₃)₂, —(CH₂CH₂O)₃CH₂CH₂N(CH₃)₃ ⁺AN⁻, —(CH₂CH₂O)₅CH₂CH₂NC(O)CH₃, —(CH₂CH₂O)₈CH₂CH₂NC(O)CH₃, or
[1703] X3 is a direct bond, (D) arginine, (D) lysine substituted with R^{b},

[chemical structure]

[1704] wherein:
   [1705] R^{b} is

[chemical structure]

[1706] R² is H, —CH(CH₃)₂

[chemical structure]

[1707] wherein:
   [1708] R^{c} is H, or —CH₃;
   [1709] R^{c}′ is H, or —CH₃;
   [1710] R^{d} is

[chemical structure]

[1711] X8

[chemical structure]

[1712] wherein:
   [1713] R^{e} is H, or —CH₃;
   [1714] R^{ee} is H;
   [1715] R^{f} is H, —CH₃, —C(CH₃)₃, —C(O)CH₃, —C(O)(CH₂CH₂O)₆CH₃, —(CH₂CH₂O)₆CH₃,

[chemical structure]

[1716] R^{g} is H, —OH, —C(O)NH₂, or —CH₂NHC(O)CH₃;
[1717] n is 0, or 1;
[1718] X12 is absent,

[chemical structure]

[1719] R⁶ is —CH₃, —CH₂CH₂C(O)R^{m}, —(CH₂)ₛNRⁿR^{o},

[chemical structure]

[1720] R⁷ is H, or —CH₃
   [1721] wherein:
      [1722] R^{m} is —OH, or

[chemical structure]

[1723] Rⁿ is H, —CH₃, —CH₂CH(CH₃)₂, —C(O)CH₃, —C(O)(CH₂CH₂O)₆CH₃, —(CH₂CH₂O ₆CHs, —C(O)(CH₂CH₂O)ₜCH₂CH₂R^{p},

[chemical structure]

[1724] R^{o} is H, —CH₃, or —C(O)CH₃;
[1725] wherein:
   [1726] R^{p} is NHC(O)CH₃, or

[chemical structure]

[1727] s is 1, 2, or 4;
[1728] t is 2, 6, 9, or 12;
[1729] u is 2 or 3;
[1730] v is 10 or 12;
[1731] R⁸ is —CH₂CH₂CH₂NHC(O)CH₃, —C(O)NH₂, or —C(O)NHCH₃;
[1732] X15 is absent,

[chemical structure]

[1733] wherein:
[1734] AN⁻as above defined for A, R, X3, X12, R1, R2, R5, R6, R8, R15, R16 and R^{a}, R^{b}, R^{d}, R^{f}, R^{h}, Rⁱ, R^{j}, R^{k}, R^{m}, Rⁿ, R^{o}, R^{s} is acetate, adipate, benzoate, benzenesulfonate, citrate, decanoate, chloride, lactate, maleate, methanesulfonate, oxalate, pivalate, propionate, succinate, sulfate, tartrate, or trifluoroacetate; or
[1735] a pharmaceutically acceptable salt thereof.

[1736] In another aspect of the invention:

[1737] 15. The compound of aspect 14 which is
[1738] MeCO-Pen(3)—N-T-7MeW—K(Ac)-Pen(3)-AEF-2Nal-aMeK—K(Ac)—N-dK-NMeDTyr-CONH2;
[1739] MeCO-Pen(3)—N-T-7MeW—K(Ac)-Pen(3)-AEF-2Nal-aMeK—K(Ac)—N-dL-NMeDTyr-CONH2;
[1740] MeCO-Pen(3)—N-T-7MeW—K(Ac)-Pen(3)-AEF-2Nal-aMeK—K(Ac)—N—F—NMeDTyr-CONH2;
[1741] MeCO-Pen(3)—N-T-7MeW—K(Ac)-Pen(3)-AEF-2Nal-aMeK—K(Ac)—N—H—NMeDTyr-CONH2;
[1742] MeCO-r-Pen(3)—N-T-7MeW—K(Ac)-Pen(3)-AEF-2Nal-aMeK-E-N—H—NMeDTyr-CONH2;
[1743] MeCO-Pen(3)—N-T-7MeW—K(Ac)-Pen(3)-AEF-2Nal-aMeK—K(Ac)—N-Paf-NMeDTyr-CONH2;
[1744] MeCO-r-Pen(3)—N-T-7MeW—K(Ac)-Pen(3)-AEF-2Nal-THP-E-N-h-NMeDTyr-CONH2;
[1745] MeCO-r-Pen(3)—N-T-7MeW—K(Ac)-Pen(3)-AEF-2Nal-THP-E-N—N—NMeDTyr-CONH2;
[1746] MeCO-Pen(3)—N-T-7MeW—K(Ac)-Pen(3)-AEF-2Nal-aMeK—K(Ac)—N—N—NMeDTyr-CONH2;
[1747] MeCO-Pen(3)—N-T-7MeW—K(Ac)-Pen(3)-AEF-2Nal-aMeK—K(Ac)—N-v-NMeDTyr-CONH2;
[1748] MeCO-Pen(3)—N-T-7MeW—K(Ac)-Pen(3)-AEF-2Nal-aMeK—K(Ac)—N-t-NMeDTyr-CONH2;
[1749] MeCO-r-Pen(3)—N-T-7MeW-Cit-Pen(3)-AEF-2Nal-aMeL-E-N-k-NMeDTyr-CONH2;
[1750] MeCO-r-Pen(3)—N-T-7MeW-Cit-Pen(3)-AEF-2Nal-aMeL-E-N-h-NMeDTyr-CONH2;
[1751] MeCO-Pen(3)—N-T-7MeW—K(Ac)-Pen(3)-AEF-2Nal-aMeK—K(Ac)—N-orn-NMeDTyr-CONH2;
[1752] MeCO-Pen(3)—N-T-7MeW—K(Ac)-Pen(3)-AEF-2Nal-aMeK—K(Ac)—N-s-NMeDTyr-CONH2;
[1753] MeCO-Pen(3)—N-T-7MeW—K(Ac)-Pen(3)-AEF-2Nal-aMeK—K(Ac)—N-f-NMeDTyr-CONH2;
[1754] MeCO-Pen(3)—N-T-7MeW—Y-Pen(3)-AEF-2Nal-aMeK—K(Ac)—N-k-NMeDTyr-CONH2;
[1755] MeCO-Pen(3)—N-T-7MeW-4AmPhe-Pen(3)-AEF-2Nal-aMeK—K(Ac)—N-k-NMeDTyr-CONH2;
[1756] MeCO-Pen(3)—N-T-7MeW-Paf(Ac)-Pen(3)-AEF-2Nal-aMeK—K(Ac)—N-k-NMeDTyr-CONH2;
[1757] MeCO-Pen(3)—N-T-7MeW—K(Ac)-Pen(3)-AEF-2Nal-aMeK—K(Ac)—N-y-NMeDTyr-CONH2;
[1758] MeCO-Pen(3)—N-T-7MeW-Cit-Pen(3)-AEF-2Nal-aMeL-K(Ac)—N-k-NMeDTyr-CONH2;
[1759] MeCO-Pen(3)—N-T-7MeW—K(Ac)-Pen(3)-AEF-2Nal-aMeK—K(Ac)—N-h-NMeDTyr-CONH2;
[1760] MeCO-Pen(3)—N-T-7MeW—K(Ac)-Pen(3)-AEF-2Nal-aMeK—K(Ac)—N-bAla-NMeDTyr-CONH2;
[1761] MeCO-Pen(3)—N-T-7MeW—K(Ac)-Pen(3)-AEF-2Nal-aMeK—K(Ac)—N-bAla-NMeDTyr-CONH2;
[1762] MeCO-Pen(3)—N-T-7MeW—K(Ac)-Pen(3)-AEF-2Nal-aMeK—K(Ac)—N-bAla-NMeDTyr-CONH2;
[1763] MeCO-Pen(3)—N-T-7MeW—K(Ac)-Pen(3)-AEF-2Nal-aMeK—K(Ac)—N-3Pya-NMeDTyr-CONH2;
[1764] MeCO-Pen(3)—N-T-7MeW—K(Ac)-Pen(3)-AEF-2Nal-aMeK—K(Ac)—N-3pya-NMeDTyr-CONH2;
[1765] MeCO-r-Pen(3)—N-T-7MeW—K(Ac)-Pen(3)-AEF-2Nal-THP-E-N-3Pya-NMeDTyr-CONH2;
[1766] MeCO-r-Pen(3)-Q-T-W-Q-Pen(3)-AEF-2Nal-THP-aMeE-N—F—NMeDTyr-CONH2;
[1767] MeCO-r-Pen(3)-Q-T-W-Q-Pen(3)-AEF-2Nal-THP-E-N—N—NMe DTyr-CONH2;
   [1768] or a pharmaceutically acceptable salt thereof.

[1769] In another aspect of the invention:

[1770] 16. A compound of Formula (VI)

[chemical structure]

wherein:
[1771] R¹ is —C(O)C(1-2)alkyl, —C(O)CF₃, —COCH₂CF₃, —CO(CH₂)₅N(CH₃)₃⁺AN⁻, —CH₂CH₂NHC(O)CH₂O(CH₂CH₂O)₂CH₃, —CH₂CH₂NHC(O)(CH₂CH₂O)₆CH₃,

[chemical structure]

[1772] wherein:
[1773] Rₐ is

[chemical structure]

CH₂CH₂OCH₂CH₂N(CH₃)₂,
[1774] —(CH₂CH₂O)₃CH₂CH₂N(CH₃)₂, —(CH₂CH₂O)₃CH₂CH₂N(CH₃)₃ ⁺AN⁻, —(CH₂CH₂O)₅CH₂CH₂NC(O)CH₃, —(CH₂CH₂O)₈CH₂CH₂NC(O)CH₃, or —(CH₂CH₂O)₁₁CH₂CH₂NC(O)CH₃;
[1775] X3 is a direct bond, (D) arginine, (D) lysine substituted with R^{b},

[chemical structure]

[1776] wherein:
[1777] R^{b} is

[chemical structure]

[1778] R² is H, —CH(CH₃)₂,

[chemical structure]

[1779] wherein:
   [1780] R^{c} is H, or —CH₃;
   [1781] R^{c}′ is H, or —CH₃;
   [1782] R^{d} is

[chemical structure]

[1783] R³ is H, —CH₃, —CF₃, or

[chemical structure]

[1784] R⁴ is H, or —CH₃;
[1785] X8 is

[chemical structure]

[1786] wherein:
   [1787] R^{e} is H, or —CH₃;
   [1788] R^{ee} is H;
   [1789] R^{f} is H, —CH₃, —C(CH₃)₃, —C(O)CH₃, —C(O)(CH₂CH₂O)₆CH₃, —(CH₂CH₂O)₆CH₃,

[chemical structure]

[1790] R^{g} is H, —OH, —C(O)NH₂, or —CH₂NHC(O)CH₃;
[1791] n is 0, or 1;
[1792] X12 is absent,

[chemical structure]

[1793] R⁶ is —CH₃, —CH₂CH₂C(O)R^{m}, —(CH₂)ₛNRⁿR^{o},

[chemical structure]

[1794] R⁷ is H, or —CH₃;
   [1795] wherein:
      [1796] R^{m} is —OH, or

[chemical structure]

[1797] Rⁿ is H, —CH₃, —CH₂CH(CH₃)₂, —C(O)CH₃, —C(O)(CH₂CH₂O)₆CH₃, —(CH₂CH₂O)₆CH₃, —C(O)(CH₂CH₂O)ₜCH₂CH₂R^{p},

[chemical structure]

[1798] R^{o} is H, —CH₃, or —C(O)CH₃;
[1799] wherein:
   [1800] R^{p} is NHC(O)CH₃, or

[chemical structure]

[1801] s is 1, 2, or 4;
[1802] t is 2, 6, 9, or 12;
[1803] u is 2 or 3;
[1804] v is 10 or 12;
[1805] R⁸ is —CH₂CH₂CH₂NHC(O)CH₃, —C(O)NH₂, or —C(O)NHCH₃;
[1806] X15 is absent,

[chemical structure]

[1807] X16 is absent,

[chemical structure]

[1808] wherein:
   [1809] R^{q} is

[chemical structure]

[1810] R^{r} is H;
[1811] w is 2 4, or 5;
[1812] x is 2 or N and
[1813] R⁹ is —NH₂, —NHCH₃, —N(CH₃)₂, —NH(CH₂CH₂O)₂CH₃, —N(CH₃)(CH₂CH₂O)₂CH₃, —NH(CH₂CH₂O)_{y}R^{s},

[chemical structure]

[1814] wherein:
   [1815] y is 2, 4, or 6;
[1816] R^{s} is —CH₃, or

[chemical structure]

wherein:
[1817] AN⁻as above defined for A, R, X3, X12, R1, R2, R5, R6, R8, R15, R16 and R^{a}, R^{b}, R^{d}, R^{f}, R^{h}, Rⁱ, R^{j}, R^{k}, R^{m}, Rⁿ, R^{o}, R^{s} is acetate, adipate, benzoate, benzenesulfonate, citrate, decanoate, chloride, lactate, maleate, methanesulfonate, oxalate, pivalate, propionate, succinate, sulfate, tartrate, or trifluoroacetate; or
[1818] a pharmaceutically acceptable salt thereof.

[1819] In another aspect of the invention:

[1820] 17. The compound of aspect 16 wherein
[1821] AN⁻is chloride;
[1822] or a pharmaceutically acceptable salt thereof.

[1823] In another aspect of the invention:

[1824] 18. The compound of aspect 16 which is
[1825] cPEG3aCO-Pen(3)—N(N(Me)2)-T-7MeW—K(NMeAC)-Pen(3)-TMAPF-2Nal-THP-K(NMeAC)—N-3Pya-NMeK(PEG2PEG2C12)—CONH2;
[1826] cPEG3aCO-Pen(3)—N(N(Me)2)-T-7MeW—K(Ac)-Pen(3)-TMAPF-2Nal-THP-K(NMeAc)—N-3Pya-NMeK(PEG2PEG2C14)—CONH2;
[1827] C12gEPEG2PEG2CO-Pen(3)—N(N(Me)2)-T-7MeW—K(Ac)-Pen(3)-TMAPF-2Nal-THP-K(NMeAc)—N-3Pya-NMeK(PEG2PEG2gEC12)—CONH2;
[1828] cPEG3aCO-Pen(3)—K(PEG2PEG2gEC12)-T-7MeW—K(Ac)-Pen(3)-TMAPF-2Nal-THP-K(NMeAc)—N-3Pya-NMeK(PEG2PEG2gEC12)—CONH2;
[1829] cPEG3aCO-Pen(3)—N-T-7MeW—K(Ac)-Pen(3)-TMAPF-2Nal-THP-K(PEG2PEG2gEC12)—N-3Pya-NMeK(PEG2PEG2gEC12)—CONH2;
[1830] cPEG3aCO-Pen(3)—N-T-7MeW—K(Ac)-Pen(3)-TMAPF-2Nal-THP-K(NMeAc)—N-3Pya-NMeK(PEG2PEG2gEC12)—CONH2;
[1831] cPEG3aCO-Pen(3)—N(N(Me)2)-T-7MeW—K(Ac)-Pen(3)-TMAPF-2Nal-THP-K(NMeAC)—N-3Pya-NMeK(PEG2PEG2gEC12)—CONH2;
[1832] cPEG3aCO-Pen(3)—N(N(Me)2)-T-7MeW—K(NMeAC)-Pen(3)-TMAPF-2Nal-THP-K(NMeAC)—N-3Pya-NMeK(PEG2PEG2gEC12)—CONH2;
[1833] cPEG3aCO-k(PEG2PEG2gEC12)-Pen(3)—N(N(Me)2)-T-7MeW—K(Ac)-Pen(3)-TMAPF-2Nal-THP-K(NMeAc)—N-3Pya-NMeK(PEG2PEG2gEC12)—CONH2;
[1834] cPEG3aCO-Pen(3)—N(N(Me)2)-T-7MeW—K(PEG2PEG2gEC12)-Pen(3)-TMAPF-2Nal-THP-K(NMeAc)—N-3Pya-NMeK(PEG2PEG2gEC12)—CONH2;
[1835] cPEG3aCO-Pen(3)—N(N(Me)2)-T-7MeW—K(Ac)-Pen(3)-TMAPF-2Nal-THP-K(PEG2PEG2gEC12)—N-3Pya-NMeK(PEG2PEG2gEC12)—CONH2;
[1836] C14gEPEG2PEG2CO-Pen(3)—N(N(Me)2)-T-7MeW—K(Ac)-Pen(3)-TMAPF-2Nal-THP-K(NMeAc)—N-3Pya-NMeK(PEG2PEG2gEC14)—CONH2;
[1837] cPEG3aCO-Pen(3)—K(PEG2PEG2gEC14)-T-7MeW—K(Ac)-Pen(3)-TMAPF-2Nal-THP-K(NMeAc)—N-3Pya-NMeK(PEG2PEG2gEC14)—CONH2;
[1838] cPEG3aCO-Pen(3)—N(N(Me)2)-T-7MeW—K(NMeAC)-Pen(3)-TMAPF-2Nal-THP-K(NMeAC)—N-3Pya-NMeK(PEG2PEG2gEC14)—CONH2;
[1839] cPEG3aCO-k(PEG2PEG2gEC14)-Pen(3)—N(N(Me)2)-T-7MeW—K(Ac)-Pen(3)-TMAPF-2Nal-THP-K(NMeAc)—N-3Pya-NMeK(PEG2PEG2gEC14)—CONH2;
[1840] cPEG3aCO-Pen(3)—N(N(Me)2)-T-7MeW—K(Ac)-Pen(3)-TMAPF-2Nal-THP-K(PEG2PEG2gEC14)—N-3Pya-NMeK(PEG2PEG2gEC14)—CONH2;
[1841] cPEG3aCO-Pen(3)—N(N(Me)2)-T-7MeW—K(PEG2PEG2gEC14)-Pen(3)-TMAPF-2Nal-THP-K(NMeAc)—N-3Pya-NMeK(PEG2PEG2gEC14)—CONH2;
[1842] cPEG3aCO-Pen(3)—N(N(Me)2)-T-7MeW—K(Ac)-Pen(3)-TMAPF-2Nal-THP-K(NMeAc)—N-3Pya-NMeK(PEG2PEG2K(PEG2PEG2gEC12)₂)—CONH2;
[1843] cPEG3aCO-Pen(3)—N(N(Me)2)-T-7MeW—K(Ac)-Pen(3)-TMAPF-2Nal-THP-K(NMeAc)—N-3Pya-NMeK(PEG2PEG2K(PEG2PEG2PEG2PEG2gEC12)₂)—CONH2;
[1844] cPEG3aCO-Pen(3)—N(N(Me)2)-T-7MeW—K(Ac)-Pen(3)-TMAPF-2Nal-THP-K(PEG2PEG2PEG2gEC12))—N-3Pya-NMeK(PEG2PEG2PEG2gEC12)—CONH2;
[1845] cPEG3aCO-k(PEG2PEG2PEG2PEG2gEC12)-Pen(3)—N(N(Me)2)-T-7MeW—K(Ac)-Pen(3)-TMAPF-2Nal-THP-K(NMeAc)—N-3Pya-NMeK(PEG2PEG2PEG2PEG2gEC12)—CONH2;
[1846] cPEG3aCO-Pen(3)—N(N(Me)2)-T-7MeW—K(Ac)-Pen(3)-TMAPF-2Nal-THP-K(NMeAc)—N-3Pya-NMeK(PEG2PEG6gEC12)—CONH2;
[1847] cPEG3aCO-k(PEG2PEG6gEC12)-Pen(3)—N(N(Me)2)-T-7MeW—K(Ac)-Pen(3)-TMAPF-2Nal-THP-K(NMeAc)—N-3Pya-NMeK(PEG2PEG6gEC12)—CONH2;
[1848] cPEG3aCO-Pen(3)—N(N(Me)2)-T-7MeW—K(Ac)-Pen(3)-TMAPF-2Nal-THP-K(NMeAc)—N-3Pya-NMeK(PEG2PEG6gEC14)—CONH2;
[1849] cPEG3aCO-Pen(3)—N(N(Me)2)-T-7MeW—K(Ac)-Pen(3)-TMAPF-2Nal-THP-K(NMeAc)—N-3Pya-NMeK(SP6PEG2PEG2C12)—CONH2;
[1850] cPEG3aCO-Pen(3)—N(N(Me)2)-T-7MeW—K(Ac)-Pen(3)-TMAPF-2Nal-THP-K(NMeAc)—N-3Pya-NMeK(SP6PEG2PEG2gEC12)—CONH2;
[1851] 4cpgCO-Pen(3)—N(N(Me)2)-T-7MeW—K(NMeAc)-Pen(3)-TMAPF-2Nal-THP-K(NMeAc)—N-3Pya-Sar-CON(Me)2;
[1852] 5cpaCO-Pen(3)—N(N(Me)2)-T-7MeW-Q(N(Me)2)-Pen(3)-TMAPF-2Nal-THP-Q(N(Me)2)—N-3Pya-Sar-CON(Me)2;
[1853] 5cpaCO-Pen(3)—N(N(Me)2)-T-7MeW—K(NMeAc)-Pen(3)-TMAPF-2Nal-THP-K(NMeAc)—N-3Pya-Sar-CON(Me)2;
[1854] C12gEPEG2PEG2CO-hk(Me)₃-Pen(3)—N(N(Me)2)-T-7MeW—K(NMeAc)-Pen(3)-TMAPF-2Nal-THP-K(NMeAc)—N-3Pya-Sar-CON(Me)2;
[1855] C12gEPEG2PEG2CO-hk(Me)₃-Pen(3)—N(N(Me)2)-T-7MeW—K(PEG2PEG2gEC12)-Pen(3)-TMAPF-2Nal-THP-K(NMeAc)—N-3Pya-Sar-CON(Me)2;
[1856] C12gEPEG2PEG2CO-hk(Me)₃-Pen(3)—N(N(Me)2)-T-7MeW—K(NMeAc)-Pen(3)-TMAPF-2Nal-THP-K(PEG2PEG2gEC12)—N-3Pya-Sar-CON(Me)2;
[1857] C12gEPEG2PEG2CO-hk(Me)₃-Pen(3)—N(N(Me)2)-T-7MeW—K(NMeAc)-Pen(3)-TMAPF-2Nal-K(PEG2PEG2gEC12)—N-3Pya-Sar-CON(Me)2;
[1858] C12gEPEG2PEG2CO-k(PEG2PEG2gEC12)-Pen(3)—N(N(Me)2)-T-7MeW-Dab(NMeAc)-Pen(3)-TMAPF-2Nal-THP-K(NMeAc)—N-3Pya-Sar-CON(Me)2;
[1859] C14gEPEG2PEG2CO-hk(Me)₃-Pen(3)—K(PEG2PEG2gEC14)-T-7MeW—K(NMeAc)-Pen(3)-TMAPF-2Nal-THP-K(NMeAc)—N-3Pya-Sar-CON(Me)2;
[1860] C14gEPEG2PEG2CO-hk(Me)₃-Pen(3)—N(N(Me)2)-T-7MeW—K(NMeAc)-Pen(3)-TMAPF-2Nal-THP-K(NMeAc)—N-3Pya-Sar-CON(Me)2;
[1861] C14gEPEG2PEG2CO-hk(Me)₃-Pen(3)—N(N(Me)2)-T-7MeW—K(PEG2PEG2gEC14)-Pen(3)-TMAPF-2Nal-THP-K(NMeAc)—N-3Pya-Sar-CON(Me)2;
[1862] C14gEPEG2PEG2CO-hk(Me)₃-Pen(3)—N(N(Me)2)-T-7MeW—K(NMeAc)-Pen(3)-TMAPF-2Nal-THP-K(PEG2PEG2gEC14)—N-3Pya-Sar-CON(Me)2;
[1863] C14gEPEG2PEG2CO-k(PEG2PEG2gEC14)-Pen(3)—N(N(Me)2)-T-7MeW-Dab(NMeAc)-Pen(3)-TMAPF-2Nal-THP-K(NMeAc)—N-3Pya-Sar-CON(Me)2;
[1864] cPEG2gCO-Pen(3)—N(N(Me)2)-T-7MeW—K(NMeAc)-Pen(3)-TMAPF-2Nal-THP-K(NMeAc)—N-3Pya-Sar-CON(Me)2;
[1865] cPEG3aCO-Pen(3)—K(cPEG3a)-T-7MeW—K(NMeAc)-Pen(3)-TMAPF-2Nal-THP-K(NMeAc)—N-3Pya-Sar-CON(Me)2;
[1866] cPEG3aCO-Pen(3)—K(Me)₃-T-7MeW—K(NMeAc)-Pen(3)-TMAPF-2Nal-THP-K(NMeAc)—N-3Pya-Sar-CON(Me)2;
[1867] cPEG3aCO-Pen(3)—K(Me)₃-T-7MeW—K(NMeAc)-Pen(3)-TMAPF-2Nal-Achx-K(NMeAc)—N-3Pya-Sar-CON(Me)2;
[1868] cPEG3aCO-k(PEG2PEG2gEC12)-Pen(3)—K(PEG2PEG2gEC12)-T-7MeW—K(NMeAc)-Pen(3)-TMAPF-2Nal-THP-K(NMeAc)—N-3Pya-Sar-CON(Me)2;
[1869] cPEG3aCO-Pen(3)—K(PEG2PEG2gEC12)-T-7MeW—K(NMeAc)-Pen(3)-TMAPF-2Nal-THP-K(NMeAc)—N-3Pya-Sar-CON(Me)2;
[1870] cPEG3aCO-Pen(3)—K(PEG2PEG2gEC12)-T-7MeW—K(PEG2PEG2gEC12)-Pen(3)-TMAPF-2Nal-THP-K(NMeAc)—N-3Pya-Sar-CON(Me)2;
[1871] cPEG3aCO-Pen(3)—K(PEG2PEG2gEC12)-T-7MeW—K(NMeAc)-Pen(3)-TMAPF-2Nal-THP-K(PEG2PEG2gEC12)—N-3Pya-Sar-CON(Me)2;
[1872] cPEG3aCO-k(PEG2PEG2gEC14)-Pen(3)—K(PEG2PEG2gEC14)-T-7MeW—K(NMeAc)-Pen(3)-TMAPF-2Nal-THP-K(NMeAc)—N-3Pya-Sar-CON(Me)2;
[1873] cPEG3aCO-Pen(3)—K(PEG2PEG2gEC14)-T-7MeW—K(NMeAc)-Pen(3)-TMAPF-2Nal-THP-K(NMeAc)—N-3Pya-Sar-CON(Me)2;
[1874] cPEG3aCO-Pen(3)—K(PEG2PEG2gEC14)-T-7MeW—K(PEG2PEG2gEC14)-Pen(3)-TMAPF-2Nal-THP-K(NMeAc)—N-3Pya-Sar-CON(Me)2;
[1875] cPEG3aCO-Pen(3)—K(PEG2PEG2gEC14)-T-7MeW—K(NMeAc)-Pen(3)-TMAPF-2Nal-THP-K(PEG2PEG2gEC14)—N-3Pya-Sar-CON(Me)2;
[1876] cPEG3aCO-Pen(3)—N-T-7MeW—K(NMeAc)-Pen(3)-TMAPF-2Nal-THP-K(NMeAc)—N-3Pya-Sar-CONH2;
[1877] cPEG3aCO-Pen(3)—N-T-7MeW—K(NMeAc)-Pen(3)-TMAPF-2Nal-THP-K(NMeAc)—N-3Pya-Sar-CON(Me)2;
[1878] cPEG3aCO-Pen(3)—N-T-7MeW—K(NMeAC)-Pen(3)-TMAPF-2Nal-THP-Dab(NMeAc)—N-3Pya-Sar-CON(Me)2;
[1879] cPEG3aCO-Pen(3)—N-T-7MeW-Dab(NMeAc)-Pen(3)-TMAPF-2Nal-THP-K(NMeAC)—N-3Pya-Sar-CON(Me)2;
[1880] cPEG3aCO-Pen(3)—N-T-7MeW—K(Ac)-Pen(3)-TMAPF-2Nal-THP-A-N-3Pya-Sar-CON(Me)2;
[1881] cPEG3aCO-Pen(3)—N-T-7MeW—K(Ac)-Pen(3)-TMAPF-2Nal-THP-E-N-3Pya-Sar-CONH2;
[1882] cPEG3aCO-Pen(3)—N-T-7MeW—K(Ac)-Pen(3)-TMAPF-2Nal-THP—K(Ac)—N-3Pya-Sar-CONH2;
[1883] cPEG3aCO-Pen(3)—N-T-7(3NAcPh)W—K(Ac)-Pen(3)-TMAPF-2Nal-THP-E-N-3Pya-Sar-CONH2;
[1884] cPEG3aCO-Pen(3)—N(N(Me))-T-7MeW—K(NMeAc)-Pen(3)-TMAPF-2Nal-THP-K(NMeAc)—N-3Pya-Sar-CON(Me)2;
[1885] cPEG3aCO-Pen(3)—N(N(Me)2)-T-7MeW—K(NMeAc)-Pen(3)-TMAPF-2Nal-THP-K(NMeAc)—N-3Pya-Sar-CON(Me)2;
[1886] cPEG3aCO-Pen(3)—N(N(Me)2)-T-7MeW—K(NMeAc)-Pen(3)-TMAPF-2Nal-THP-E-N-3Pya-Sar-CON(Me)2;
[1887] cPEG3aCO-Pen(3)—N(N(Me)2)-T-7MeW—K(NMeAc)-Pen(3)-TMAPF-2Nal-THP-K(NMeAc)—N-3Pya-Sar-CO(NHPEG3a);
[1888] cPEG3aCO-Pen(3)—N(N(Me)2)-T-7MeW-APEG2Ser(S*)-Pen(3)-TMAPF-2Nal-THP-K(NMeAc)—N-3Pya-Sar-CON(Me)2;
[1889] cPEG3aCO-Pen(3)—N(N(Me)2)-T-7MeW-APEG2Ser(R*)-Pen(3)-TMAPF-2Nal-THP-K(NMeAc)—N-3Pya-Sar-CON(Me)2;
[1890] cPEG3aCO-Pen(3)—N(N(Me)2)-T-7(3NAcPh)W—K(NMeAc)-Pen(3)-TMAPF-2Nal-THP-K(NMeAc)—N-3Pya-Sar-CON(Me)2;
[1891] cPEG3aCO-Pen(3)—N(N(Me)2)-T-7MeW—K(NMeAC)-Pen(3)-TMAPF-2Nal-THP-Dab(NMeAc)—N-3Pya-Sar-CON(Me)2;
[1892] cPEG3aCO-Pen(3)—N(N(Me)2)-T-7MeW—K(Ac)-Pen(3)-TMAPF-2Nal-THP-Dab(NMeAc)—N-3Pya-Sar-CON(Me)2;
[1893] cPEG3aCO-Pen(3)—N(N(Me)2)-T-7MeW—K(NMeAC)-Pen(3)-TMAPF-2Nal-THP-Q(N(Me)2)—N-3Pya-Sar-CON(Me)2;
[1894] cPEG3aCO-Pen(3)—N(N(Me)2)-T-7MeW-Q(N(Me)2)-Pen(3)-TMAPF-2Nal-THP-K(NMeAC)—N-3Pya-Sar-CON(Me)2;
[1895] cPEG3aCO-Pen(3)—N(N(Me)2)-T-7MeW—K(NMeAc)-Pen(3)-TMAPF-2Nal-THP-A-N-3Pya-Sar-CON(Me)2;
[1896] cPEG3aCO-Pen(3)—N(N(Me)2)-T-7MeW—K(NMeAc)-Pen(3)-TMAPF-2Nal-THP-K(NMeAc)—N-3Pya-Sar-CONH2;
[1897] cPEG3aCO-Pen(3)—N(N(Me)2)-T-7MeW—K(NMeAc)-Pen(3)-TMAPF-2Nal-THP-Cit-N-3Pya-Sar-CON(Me)2;
[1898] cPEG3aCO-Pen(3)—N(N(Me)2)-T-7MeW—K(Me)₃-Pen(3)-TMAPF-2Nal-THP-K(NMeAc)—N-3Pya-Sar-CON(Me)2;
[1899] cPEG3aCO-Pen(3)—N(N(Me)2)-T-7MeW—K(NMeAc)-Pen(3)-TMAPF-2Nal-Acpx-K(NMeAc)—N-3Pya-Sar-CON(Me)2;
[1900] cPEG3aCO-Pen(3)—N(N(Me)2)-T-7MeW—K(NMeAc)-Pen(3)-TMAPF-2Nal-Achx-K(NMeAc)—N-3Pya-Sar-CON(Me)2;
[1901] cPEG3aCO-Pen(3)—N(N(Me)2)-T-7MeW—K(NMeAc)-Pen(3)-TMAPF-2Nal-Chg-K(NMeAc)—N-3Pya-Sar-CON(Me)2;
[1902] cPEG3aCO-Pen(3)—N(N(Me)2)-T-7MeW—K(NMeAc)-Pen(3)-TMAPF-2Nal-Aib-K(NMeAc)—N-3Pya-Sar-CON(Me)2;
[1903] cPEG3aCO-Pen(3)—N(N(Me)2)-T-7MeW-Cit-Pen(3)-TMAPF-2Nal-THP-K(NMeAc)—N-3Pya-Sar-CON(Me)2;
[1904] cPEG3aCO-Pen(3)—N(N(Me)2)-T-7MeW-Dab(NMeAc)-Pen(3)-TMAPF-2Nal-THP-K(NMeAc)—N-3Pya-Sar-CON(Me)2;
[1905] cPEG3aCO-Pen(3)—N(N(Me)2)-T-7MeW-Dab(NMeAc)-Pen(3)-TMAPF-2Nal-THP-K(NMeAc)—N-3Pya-Sar-CONH2;
[1906] cPEG3aCO-k(PEG2PEG2gEC12)-Pen(3)—N(N(Me)2)-T-7MeW—K(NMeAc)-Pen(3)-TMAPF-2Nal-THP-K(NMeAc)—N-3Pya-Sar-CON(Me)2;
[1907] cPEG3aCO-k(PEG2PEG2gEC14)-Pen(3)—N(N(Me)2)-T-7MeW—K(NMeAc)-Pen(3)-TMAPF-2Nal-THP-K(NMeAc)—N-3Pya-Sar-CON(Me)2;
[1908] cPEG3aCO-k(PEG2PEG2gEC12)-Pen(3)—N(N(Me)2)-T-7MeW—K(PEG2PEG2gEC12)-Pen(3)-TMAPF-2Nal-THP-K(NMeAc)—N-3Pya-Sar-CON(Me)2;
[1909] cPEG3aCO-Pen(3)—N(N(Me)2)-T-7MeW—K(cPEG3a)-Pen(3)-TMAPF-2Nal-THP-K(NMeAc)—N-3Pya-Sar-CON(Me)2;
[1910] cPEG3aCO-Pen(3)—N(N(Me)2)-T-7MeW—K(4cpg)-Pen(3)-TMAPF-2Nal-THP-K(NMeAc)—N-3Pya-Sar-CON(Me)2;
[1911] cPEG3aCO-k(PEG2PEG2gEC12)-Pen(3)—N(N(Me)2)-T-7MeW—K(NMeAc)-Pen(3)-TMAPF-2Nal-THP-K(PEG2PEG2gEC12)—N-3Pya-Sar-CON(Me)2;
[1912] cPEG3aCO-k(PEG2PEG2gEC14)-Pen(3)—N(N(Me)2)-T-7MeW—K(NMeAc)-Pen(3)-TMAPF-2Nal-THP-K(PEG2PEG2gEC14)—N-3Pya-Sar-CON(Me)2;
[1913] cPEG3aCO-Pen(3)—N(N(Me)2)-T-7MeW—K(PEG2PEG2gEC14)-Pen(3)-TMAPF-2Nal-THP-K(NMeAc)—N-3Pya-Sar-CON(Me)2;
[1914] cPEG3aCO-Pen(3)—N(N(Me)2)-T-7MeW—K(PEG2PEG2gEC12)-Pen(3)-TMAPF-2Nal-THP-K(PEG2PEG2gEC12)—N-3Pya-Sar-CON(Me)2;
[1915] cPEG3aCO-Pen(3)—N(N(Me)2)-T-7MeW—K(NMeAc)-Pen(3)-TMAPF-2Nal-THP-K(PEG2PEG2gEC12)—N-3Pya-Sar-CON(Me)2;
[1916] cPEG3aCO-Pen(3)—N(N(Me)2)-T-7MeW—K(NMeAc)-Pen(3)-TMAPF-2Nal-THP-K(PEG2PEG2gEC14)—N-3Pya-Sar-CON(Me)2;
[1917] cPEG3aCO-Pen(3)—N(N(Me)2)-T-7MeW—K(PEG2PEG2gEC14)-Pen(3)-TMAPF-2Nal-THP-K(PEG2PEG2gEC14)—N-3Pya-Sar-CON(Me)2;
[1918] cPEG3aCO-Pen(3)—N(N(Me)2)-T-7MeW-Dap(NMeAc)-Pen(3)-TMAPF-2Nal-THP-K(NMeAc)—N-3Pya-Sar-CON(Me)2;
[1919] cPEG3aCO-Pen(3)—N(N(Me)2)-T-7MeW—K(Ac)-Pen(3)-TMAPF-2Nal-THP-Dap(NMeAc)—N-3Pya-Sar-CON(Me)2;
[1920] cPEG3gCO-Pen(3)—N(N(Me)2)-T-7MeW—K(NMeAc)-Pen(3)-TMAPF-2Nal-THP-K(NMeAc)—N-3Pya-Sar-CON(Me)2;
[1921] MeCO-Pen(3)—N-T-7MeW—K(NMeAc)-Pen(3)-TMAPF-2Nal-THP-K(NMeAc)—N-3Pya-Sar-CONH2;
[1922] MeCO-Pen(3)—N-T-7MeW—K(Ac)-Pen(3)-TMAPF-2Nal-THP—K(Ac)—N-3Pya-Sar-CONH2;
[1923] MeCO-Pen(3)—N-T-7MeW—K(Ac)-Pen(3)-TMAPF-2Nal-THP-E-N-3Pya-Sar-CONH2;
[1924] MeCO-k(Me)₃-Pen(3)—N-T-7MeW—K(Ac)-Pen(3)-TMAPF-2Nal-THP-E-N-3Pya-Sar-CONH2;
[1925] MeCO-k(Me)₃-Pen(3)—N-T-7(3NAcPh)W—K(Ac)-Pen(3)-TMAPF-2Nal-THP-E-N-3Pya-Sar-CONH2;
[1926] MeCO-k(Me)₃-Pen(3)—N-T-7MeW—K(Ac)-Pen(3)-TMAPF-2Nal-THP—K(Ac)—N-3Pya-Sar-CONH2;
[1927] MeCO-Pen(3)—N-T-7(3NAcPh)W—K(Ac)-Pen(3)-TMAPF-2Nal-THP-E-N-3Pya-Sar-CONH2;
[1928] MeCO-Pen(3)—N-T-7(3NAcPh)W—K(Ac)-Pen(3)-TMAPF-2Nal-THP—K(Ac)—N-3Pya-Sar-CONH2;
[1929] MeCO-r-Pen(3)—N-T-7MeW—K(Ac)-Pen(3)-TMAPF-2Nal-THP-E-N-3Pya-Sar-CONH2;
[1930] MeCO-Pen(3)—N(N(Me)2)-T-7MeW—K(NMeAc)-Pen(3)-TMAPF-2Nal-THP-K(NMeAc)—N-3Pya-Sar-CON(Me)2;
[1931] MeCO-Pen(3)—N(N(Me)2)-T-7MeW—K(NMeAc)-Pen(3)-TMAPF-2Nal-THP-K(NMeAc)—N-3Pya-Sar-CO(NHPEG3a);
[1932] MeCO-Pen(3)—N(N(Me)2)-T-7MeW—K(NMeAc)-Pen(3)-TMAPF-2Nal-THP-APEG2Ser-N-3Pya-Sar-CON(Me)2;
[1933] MeCO-hk(Me)₃-Pen(3)—N(N(Me)2)-T-7MeW—K(NMeAc)-Pen(3)-TMAPF-2Nal-THP-K(NMeAc)—N-3Pya-Sar-CON(Me)2;
[1934] MeCO-r-Pen(3)—N(N(Me)2)-T-7MeW—K(NMeAc)-Pen(3)-TMAPF-2Nal-THP-K(NMeAc)—N-3Pya-Sar-CON(Me)2; or a pharmaceutically acceptable salt thereof.

[1935] In another aspect of the invention:

[1936] 19. A compound which is:

[chemical structure]

or a pharmaceutically acceptable salt thereof.

[1937] In another aspect of the invention:

[1938] 20. A compound which is

[chemical structure]

pharmaceutically acceptable salt thereof.

[1939] In another aspect of the invention:

[1940] 21. The compound or pharmaceutically acceptable salt thereof, according to any one of aspects 19 and 20 wherein the quarternary ammonium salts as shown in the chemical structures therein include a counterion AN⁻selected from: acetate, adipate, benzoate, benzenesulfonate, citrate, decanoate, chloride, lactate, maleate, methanesulfonate, oxalate, pivalate, propionate, succinate, sulfate, tartrate, or trifluoroacetate.

[1941] In another aspect of the invention:

[1942] 22. A pharmaceutical composition comprising the peptide inhibitor or pharmaceutically acceptable salt thereof of any one of aspect 1-21, and a pharmaceutically acceptable carrier, excipient, or diluent.

[1943] In another aspect of the invention:

[1944] 23. The pharmaceutical composition of aspect 22, further comprising an enteric coating.

[1945] In another aspect of the invention:

[1946] 24. The pharmaceutical composition of aspect 22, wherein the enteric coating protects and releases the pharmaceutical composition within a subject's lower gastrointestinal system.

[1947] In another aspect of the invention:

[1948] 24. A method for treating an Inflammatory Bowel Disease (IBD), ulcerative colitis, Crohn's disease, Celiac disease (nontropicalSprue), enteropathy associated with seronegative arthropathies, microscopic colitis, collagenous colitis, eosinophilic gastroenteritis, colitis associated with radio- or chemo-therapy, colitis associated with disorders of innate immunity as in leukocyte adhesion deficiency-1, chronic granulomatous disease, glycogen storage disease type 1b, Hermansky-Pudlak syndrome, Chediak-Higashi syndrome, and Wiskott-Aldrich Syndrome, pouchitis resulting after proctocolectomy and ileoanal anastomosis, gastrointestinal cancer, pancreatitis, insulin-dependent diabetes mellitus, mastitis, cholecystitis, cholangitis, pericholangitis, chronic bronchitis, chronic sinusitis, asthma, psoriasis, psoriatic arthritis, or graft versus host disease in a subject, comprising providing to the subject an effective amount of the peptide inhibitor or peptide inhibitor or pharmaceutically acceptable salt thereof of any one of aspects 1-21, or the pharmaceutical composition of any one of aspects 22-24.

[1949] In another aspect of the invention:

[1950] 26. The method of aspect 25, wherein the pharmaceutical composition is provided to the subject by an oral, parenteral, intravenous, peritoneal, intradermal, subcutaneous, intramuscular, intrathecal, inhalation, vaporization, nebulization, sublingual, buccal, parenteral, rectal, intraocular, inhalation, topically, vaginal, or topical route of administration.

[1951] In another aspect of the invention:

[1952] 27. The method of aspect 24 for treating Inflammatory Bowel Disease (IBD), ulcerative colitis, or Crohn's disease, wherein the pharmaceutical composition is provided to the subject orally.

[1953] In another aspect of the invention:

[1954] 28. The method of aspect 24 for treating psoriasis, wherein the pharmaceutical composition is provided to the subject orally, topically, parenterally, intravenously, subcutaneously, peritonealy, or intravenously.

[1955] In another aspect of the invention:

[1956] 29. The peptide inhibitor or peptide inhibitor or pharmaceutically acceptable salt thereof of any one of aspects 1-21, or the pharmaceutical composition of any one of aspects 22-24, for use in the treatment of an Inflammatory Bowel Disease (IBD), ulcerative colitis, Crohn's disease, Celiac disease (nontropicalSprue), enteropathy associated with seronegative arthropathies, microscopic colitis, collagenous colitis, eosinophilic gastroenteritis, colitis associated with radio- or chemo-therapy, colitis associated with disorders of innate immunity as in leukocyte adhesion deficiency-1, chronic granulomatous disease, glycogen storage disease type 1b, Hermansky-Pudlak syndrome, Chediak-Higashi syndrome, and Wiskott-Aldrich Syndrome, pouchitis resulting after proctocolectomy and ileoanal anastomosis, gastrointestinal cancer, pancreatitis, insulin-dependent diabetes mellitus, mastitis, cholecystitis, cholangitis, pericholangitis, chronic bronchitis, chronic sinusitis, asthma, psoriasis, psoriatic arthritis, or graft versus host disease in a subject, comprising providing to the subject an effective amount of the peptide inhibitor or peptide inhibitor or pharmaceutically acceptable salt thereof of any one of aspects 1-21, or the pharmaceutical composition of any one of aspects 22-24.

[1957] In another aspect of the invention:

[1958] 30. The composition for use according to aspect 29, wherein the pharmaceutical composition is provided to the subject by an oral, parenteral, intravenous, peritoneal, intradermal, subcutaneous, intramuscular, intrathecal, inhalation, vaporization, nebulization, sublingual, buccal, parenteral, rectal, intraocular, inhalation, topically, vaginal, or topical route of administration.

[1959] In another aspect of the invention:

[1960] 31. The composition for use according to aspect 29 for treating Inflammatory Bowel Disease (IBD), ulcerative colitis, or Crohn's disease, wherein the pharmaceutical composition is provided to the subject orally.

[1961] In another aspect of the invention:

[1962] 32. The composition for use according to aspect 29 for treating psoriasis, wherein the pharmaceutical composition is provided to the subject orally, topically, parenterally, intravenously, subcutaneously, peritonealy, or intravenously.

[1963] In another aspect of the invention:

[1964] 33. A compound which is selected from of any of the tables 1A, 1B, 1C, 1D, and lE or pharmaceutically acceptable salts thereof.

[1965] In another aspect of the invention:

[1966] 34. A compound of Formula (I) or (II) wherein X3 is

[chemical structure]

or a pharmaceutically acceptable salt thereof

[1967] 35. A compound of Formula (VII)

[chemical structure]

[1968] wherein:
[1969] A is

[chemical structure]

[1970] wherein:
   [1971] R⁵ is —OCHF₂, —O(CH₂)₉CO₂H,

[chemical structure]

[1972] wherein:
   [1973] R^{h} is H, —CH₃, —C(O)CH₃, —C(NH)NH₂, —(CH₂)₃O(CH₂)₂OCH₃, —CH₂CH₂OCH₃, —(CH₂CH₂O)₃CH₃, —(CH₂CH₂O)₆CH₃,

[chemical structure]

[chemical structure]

[1974] Rⁱ is H, —CH₃, —(CH₂)₃O(CH₂)₂OCH₃,
[1975] p is 1, 2 or 3;
[1976] R^{j} is

[chemical structure]

[1977] q is 1, 2, 3, 4, or 5;
   [1978] R^{k} is —OCH₃,

[chemical structure]

[1979] r is 3, 4, 5, 6, or 8;
[1980] wherein:
   [1981] R^{jj} is H, —(CH₂)₇CH₃, —(CH₂)₁₅CH₃, —(CH₂)₂OCH₃, or —(CH₂CH₂O)₃CH₃;
[1982] R¹ is —C(O)C(1-2)alkyl, —C(O)CF₃, —COCH₂CF₃, —CO(CH₂)₅N(CH₃)₃⁺AN⁻, —CH₂CH₂NHC(O)CH₂O(CH₂CH₂O)₂CH₃, —CH₂CH₂NHC(O)(CH₂CH₂O)₆CH₃,

[chemical structure]

[1983] wherein:
   [1984] R^{a} is

[chemical structure]

CH₂CH₂OCH₂CH₂N(CH₃)₂,
[1985] —(CH₂CH₂O)₃CH₂CH₂N(CH₃)₂, —(CH₂CH₂O)₃CH₂CH₂N(CH₃)₃ ⁺AN⁻, —(CH₂CH₂O)₅CH₂CH₂NC(O)CH₃, —(CH₂CH₂O)₈CH₂CH₂NC(O)CH₃, or —(CH₂CH₂O)₁₁CH₂CH₂NC(O)CH₃;
[1986] X3 is a direct bond, (D) arginine, (D) lysine substituted with R^{b},

[chemical structure]

[1987] wherein:
   [1988] R^{b} is

[chemical structure]

[1989] R² is H, —CH(CH₃)₂,

[chemical structure]

[1990] wherein:
   [1991] R^{c} is H, or —CH₃;
   [1992] R^{c}′ is H, or —CH₃;
   [1993] R^{d} is

[chemical structure]

[1994] R³ is H, —CH₃, —CF₃, or

[chemical structure]

[1995] R⁴ is H, or —CH₃;
[1996] X8 is

[chemical structure]

[1997] wherein:
   [1998] R^{e} is H, or —CH₃;
   [1999] R^{ee} is H;
   [2000] R^{f} is H, —CH₃, —C(CH₃)₃, —C(O)CH₃, —C(O)(CH₂CH₂O)₆CH₃, —(CH₂CH₂O)₆CH₃,

[chemical structure]

[2001] R^{g} is H, —OH, —C(O)NH₁₂, or —CH₂NHC(O)CH₃;
[2002] n is 0, or 1;
[2003] X12 is absent,

[chemical structure]

[2004] R⁶ is —CH₃, —CH₂CH₂C(O)R^{m}, ⁿ(CH₂)ₛNRⁿR^{o},

[chemical structure]

[2005] R⁷ is H, or —CH3;
   [2006] wherein:
      [2007] R^{m} is —OH, or

[chemical structure]

[2008] Rⁿ is H, —CH₃, —CH₂CH(CH₃)₂, —C(O)CH₃, —C(O)(CH₂CH₂O)₆CH₃, —(CH₂CH₂O)₆CH₃, —C(O)(CH₂CH₂O)ₜCH₂CH₂R^{p},

[chemical structure]

[2009] R^{o} is H, —CH₃, or —C(O)CH₃;
[2010] wherein:
   [2011] R^{p} is NHC(O)CH₃, or

[chemical structure]

[2012] s is 1, 2, or 4;
[2013] t is 2, 6, 9, or 12;
[2014] u is 2 or 3;
[2015] v is 10 or 12;
[2016] R⁸ is —CH₂CH₂CH₂NHC(O)CH₃, —C(O)NH₂, or —C(O)NHCH₃;
[2017] X15 is absent,

[chemical structure]

[2018] X16 is absent

[chemical structure]

[2019] wherein:
   [2020] R^{q}

[chemical structure]

[2021] R^{r} is H;
[2022] w is 24, or 5;
[2023] x is 20r 4; and
[2024] R⁹ is —NH₂, —NHCH₃, —N(CH₃)₂, —NH(CH₂CH₂O)₂CH₃, —N(CH₃)(CH₂CH₂O)₂CH₃, —NH(CH₂CH₂O)_{y}R^{s},

[chemical structure]

[2025] wherein:
   [2026] y is 2, 4, or 6;
   [2027] R^{s} is —CH₃ or

[chemical structure]

wherein:
[2028] AN⁻as above defined for A, R, X3, X12, R1, R2, R5, R6, R8, R15, R16 and R^{a}, R^{b}, R^{d}, R^{f}, R^{h}, Rⁱ, R^{j}, R^{k}, R^{m}, Rⁿ, R^{o}, R^{s} is acetate, adipate, benzoate, benzenesulfonate, citrate, decanoate, chloride, lactate, maleate, methanesulfonate, oxalate, pivalate, propionate, succinate, sulfate, tartrate, or trifluoroacetate; or
[2029] a pharmaceutically acceptable salt thereof.

[2030] In another aspect of the invention

[2031] 36. A compound of Formula (VIII)

[chemical structure]

[2032] wherein:
[2033] A is

[chemical structure]

[2034] wherein:
   [2035] R⁵ is —OCHF₂, —O(CH₂)₉CO₂H,

[chemical structure]

[2036] wherein:
   [2037] R^{h} is H, —CH₃, —C(O)CH₃, —C(NH)NH₂, —(CH₂)₃O(CH₂)₂OCH₃, —CH₂CH₂OCH₃, —(CH₂CH₂O)₃CH₃, —(CH₂CH₂O)₆CH₃,

[chemical structure]

[2038] Rⁱ is H, —CH₃, —(CH₂)₃O(CH₂)₂OCH₃,

[chemical structure]

[2039] p is 1, 2 or 3;
[2040] R^{j} is

[chemical structure]

[2041] q is 1, 2, 3, 4, or 5;
[2042] R^{k} is —OCH₃,

[chemical structure]

[2043] r is 3, 4, 5, 6, or 8;
[2044] wherein:
   [2045] R^{jj} is H, —(CH₂)₇CH₃, —(CH₂)₁₅CH₃, —(CH₂)₂OCH₃, or —(CH₂CH₂O)₃CH₃;
[2046] R¹ is —C(O)C(1-2)alkyl, —C(O)CF₃, —COCH₂CF₃, —CO(CH₂)₅N(CH₃)₃+AN, —CH₂CH₂NHC(O)CH₂O(CH₂CH₂O)₂CH₃, —CH₂CH₂NHC(O)(CH₂CH₂O)₆CH₃,

[chemical structure]

[2047] wherein
   [2048] R^{a} is,

[chemical structure]

CH₂CH₂OCH₂CH₂N(CH₃)₂,
[2049] —(CH₂CH₂O)₃CH₂CH₂N(CH₃)₂, —(CH₂CH₂O)₃CH₂CH₂N(CH₃)₃ ⁺AN⁻, —(CH₂CH₂O)₅CH₂CH₂NC(O)CH₃, —(CH₂CH₂O)₈CH₂CH₂NC(O)CH₃, or —(CH₂CH₂O)₁₁CH₂CH₂NC(O)CH₃;
[2050] X3 is a direct bond, (D) arginine, (D) lysine substituted with R^{b},

[chemical structure]

[2051] wherein:
   [2052] R^{b} is

[chemical structure]

[2053] R² is H, —CH(CH₃)₂,

[chemical structure]

[2054] wherein:
   [2055] R^{c} is H, or —CH₃;
   [2056] R^{c}′ is H, or —CH₃;
   [2057] R^{d} is

[chemical structure]

[2058] R³ is H, —CH₃, —CF₃, or

[chemical structure]

[2059] R⁴ is H, or —CH₃;
[2060] X8 is

[chemical structure]

[2061] wherein:
   [2062] R^{e} is H, or —CH₃;
   [2063] R^{ee} is H;
   [2064] R^{f} is H, —CH₃, —C(CH₃)₃, —C(O)CH₃, —C(O)(CH₂CH₂O)₆CH₃, —(CH₂CH₂O)₆CH₃,

[chemical structure]

[2065] R^{g} is H, —OH, —C(O)NH₂, or —CH₂NHC(O)CH₃;
[2066] n is 0, or 1;
[2067] X12 is absent,

[chemical structure]

[2068] R⁶ is —CH₃, —CH₂CH₂C(O)R^{m}, —(CH₂)ₛNRⁿR^{o},

[chemical structure]

[2069] R⁷ is H, or —CH₃;
[2070] wherein:
   [2071] R^{m} is —OH, or

[chemical structure]

[2072] Rⁿ is H, —CH₃, —CH₂CH(CH₃)₂, —C(O)CH₃, —C(O)(CH₂CH₂O)₆CH₃, —(CH₂CH₂O)₆CH₃, —C(O)(CH₂CH₂O)ₜCH₂CH₂R^{p},

[chemical structure]

[2073] R^{o} is H, —CH₃, or —C(O)CH₃;
   [2074] wherein: PGP-723 C1
      [2075] R^{p} is NHC(O)CH₃, or

[chemical structure]

[2076] s is 1, 2, or 4;
[2077] t is 2, 6, 9, or 12;
[2078] u is 2 or 3;
[2079] v is 10 or 12;
[2080] R⁸ is —CH₂CH₂CH₂NHC(O)CH₃, —C(O)NH₂, or —C(O)NHCH₃;
[2081] X15 is absent,

[chemical structure]

[2082] X16 is absent,

[chemical structure]

[2083] wherein:
   [2084] R^{q} is

[chemical structure]

[2085] R^{r} is H;
[2086] w is 24, or 5;
[2087] x is 2 or 4; and
[2088] R⁹ is —NH₂, —NHCH₃, —N(CH₃)₂, —NH(CH₂CH₂O)₂CH₃, —N(CH₃)(CH₂CH₂O)₂CH₃, —NH(CH₂CH₂O)_{y}R^{s},

[chemical structure]

[2089] wherein:
   [2090] y is 2, 4, or 6;
   [2091] R^{s} is —CH₃, or

[chemical structure]

wherein:
[2092] AN⁻as above defined for A, R, X3, X12, R1, R2, R5, R6, R8, R15, R16 and R^{a}, R^{b}, R^{d}, R^{f}, R^{h}, Rⁱ, R^{j}, R^{k}, R^{m}, Rⁿ, R^{o}, R^{s} is acetate, adipate, benzoate, benzenesulfonate, citrate, decanoate, chloride, lactate, maleate, methanesulfonate, oxalate, pivalate, propionate, succinate, sulfate, tartrate, or trifluoroacetate; or
[2093] a pharmaceutically acceptable salt thereof

[2094] 37. In another aspect of the invention:

[2095] A compound of Formula (IX)

[chemical structure]

[2096] wherein:

[chemical structure]

[2097] wherein:
   [2098] R⁵ is —OCHF₂, —O(CH₂)₉CO₂H,

[chemical structure]

[2099] wherein:
   [2100] R^{h} is H, —CH₃, —C(O)CH₃, —C(NH)NH₂, —(CH₂)₃O(CH₂)₂OCH₃, —CH₂CH₂OCH₃, —(CH₂CH₂O)₃CH₃, —(CH₂CH₂O)₆CH₃,

[chemical structure]

[2101] Rⁱ is H, —CH₃—(CH₂)₃O(CH₂)₂OCH₃,

[chemical structure]

[2102] p is 1, 2 or 3;
[2103] R^{j} is

[chemical structure]

[2104] q is 1, 2, 3, 4, or 5;
[2105] R^{k} is —OCH₃,

[chemical structure]

[2106] r is 3, 4, 5, 6, or 8;
[2107] wherein:
   [2108] R^{jj} is H, —(CH₂)₇CH₃, —(CH₂)₁₅CH₃, —(CH₂)₂OCH₃, or —(CH₂CH₂O)₃CH₃;
[2109] R¹ is —C(O)C(1-2)alkyl, —C(O)CF₃, —COCH₂CF₃, —CO(CH₂)₅N(CH₃)₃⁺AN⁻, —CH₂CH₂NHC(O)CH₂O(CH₂CH₂O)₂CH₃, —CH₂CH₂NHC(O)(CH₂CH₂O)₆CH₃,

[chemical structure]

[2110] wherein:
   [2111] R^{a} is |,

[chemical structure]

CH₂CH₂OCH₂CH₂N(CH₃)₂,
[2112] —(CH₂CH₂O)₃CH₂CH₂N(CH₃)₂, —(CH₂CH₂O)₃CH₂CH₂N(CH₃)₃ ⁺AN⁻, —(CH₂CH₂O)₅CH₂CH₂NC(O)CH₃, —(CH₂CH₂O)₈CH₂CH₂NC(O)CH₃, or —(CH₂CH₂O)₁₁CH₂CH₂NC(O)CH₃;
[2113] X3 is a direct bond, (D) arginine, (D) lysine substituted with R^{b},

[chemical structure]

[2114] wherein:
   [2115] R^{b} is

[chemical structure]

[2116] R² is H, —CH(CH₃)₂,

[chemical structure]

[2117] wherein:
   [2118] R^{c} is H, or —CH₃;
   [2119] R^{c}′ is H, or —CH₃;
   [2120] R^{d} is

[chemical structure]

[2121] R³ is H, —CH₃, —CF₃, or

[chemical structure]

[2122] R⁴ is H, or —CH₃;

[chemical structure]

[2123] wherein:
   [2124] R^{e} is H, or —CH₃;
   [2125] R^{ee} is H;
   [2126] R^{f} is H, —CH₃, —C(CH₃)₃, —C(O)CH₃, —C(O)(CH₂CH₂O)₆CH₃, —(CH₂CH₂O)₆CH₃,

[chemical structure]

[2127] R^{g} is H, —OH, —C(O)NH₂, or —CH₂NHC(O)CH₃;
[2128] n is 0, or 1;
[2129] X12 is absent,

[chemical structure]

[2130] R⁶ is —CH₃, —CH₂CH₂C(O)R^{m}, —(CH₂)ₛNRⁿR^{o},

[chemical structure]

[2131] R⁷ is H, or —CH₃;
[2132] wherein:
   [2133] R^{m} is —OH, or

[chemical structure]

[2134] Rⁿ is H, —CH₃, —CH₂CH(CH₃)₂, —C(O)CH₃, —C(O)(CH₂CH₂O)₆CH₃, —(CH₂CH₂O)₆CH₃, —C(O)(CH₂CH₂O)ₜCH₂CH₂R^{p},

[chemical structure]

[2135] R^{o} is H, —CH₃, or _C(O)CH₃;
[2136] wherein:
   [2137] R^{p} is NHC(O)CH₃, or

[chemical structure]

[2138] s is 1,2, or 4;
[2139] t is 2, 6, 9, or 12;
[2140] u is 2 or 3;
[2141] v is 10 or 12;
[2142] R⁸ is —CH₂CH₂CH₂NHC(O)CH₃, —C(O)NH₂, or —C(O)NHCH₃;
[2143] X15 is absent,

[chemical structure]

[2144] X16 is absent,

[chemical structure]

[2145] wherein:
   [2146] R^{q} is

[chemical structure]

[2147] R^{r} is H;
[2148] w is 24, or 5;
[2149] x is 2 or 4; and
[2150] R⁹ is —NH₂, —NHCH₃, —N(CH₃)₂, —NH(CH₂CH₂O)₂CH₃, —N(CH₃)(CH₂CH₂O)₂CH₃, —NH(CH₂CH₂O)_{y}R^{s},

[chemical structure]

[2151] wherein:
   [2152] y is 2, 4, or 6;
   [2153] R^{s} is —CH₃, or

[chemical structure]

wherein:
[2154] AN⁻as above defined for A, R, X3, X12, R1, R2, R5, R6, R8, R15, R16 and R^{a}, R^{b}, R^{d}, R^{f}, R^{h}, Rⁱ, R^{j}, R^{k}, R^{m}, Rⁿ, R^{o}, R^{s} is acetate, adipate, benzoate, benzenesulfonate, citrate, decanoate, chloride, lactate, maleate, methanesulfonate, oxalate, pivalate, propionate, succinate, sulfate, tartrate, or trifluoroacetate; or
[2155] a pharmaceutically acceptable salt thereof.

[2156] In another aspect of the invention

[2157] 38. A compound of Formula (X)

[chemical structure]

[2158] wherein:
[2159] A is

[chemical structure]

[2160] wherein
   [2161] R⁵ is —OCHF₂, —O(CH₂)₉CO₂H,

[chemical structure]

[chemical structure]

[2162] wherein:
   [2163] R^{h} is H, —CH₃, —C(O)CH₃, —C(NH)NH₂, —(CH₂)₃O(CH₂)₂OCH₃, —CH₂CH₂OCH₃, —(CH₂CH₂O)₃CH₃, —(CH₂CH₂O)₆CH₃,

[chemical structure]

[2164] Rⁱ is H, —CH₃, —(CH₂)₃O(CH₂)₂OCH₃,

[chemical structure]

[2165] p is 1, 2 or 3;
[2166] R^{j} is

[chemical structure]

[2167] q is 1, 2, 3, 4, or 5;
[2168] R^{k} is —OCH₃,

[chemical structure]

[2169] r is 3, 4, 5, 6, or 8;
[2170] wherein:
   [2171] R^{jj} is H, —(CH₂)₇CH₃, —(CH₂)₁₅CH₃, —(CH₂)₂OCH₃, or —(CH₂CH₂O)₃CH₃;
[2172] R¹ is —C(O)C(1-2)alkyl, —C(O)CF₃, —COCH₂CF₃, —CO(CH₂)₅N(CH₃)₃⁺AN⁻, —CH₂CH₂NHC(O)CH₂O(CH₂CH₂O)₂CH₃, —CH₂CH₂NHC(O)(CH₂CH₂O)₆CH₃,

[chemical structure]

[2173] wherein:
   [2174] R^{a} is

[chemical structure]

CH₂CH₂OCH₂CH₂N(CH₃)₂,
[2175] —(CH₂CH₂O)₃CH₂CH₂N(CH₃)₂, —(CH₂CH₂O)₃CH₂CH₂N(CH₃)₃ ⁺AN⁻, —(CH₂CH₂O)₅CH₂CH₂NC(O)CH₃, —(CH₂CH₂O)₈CH₂CH₂NC(O)CH₃, or —(CH₂CH₂O)₁₁CH₂CH₂NC(O)CH₃;
[2176] X3 is a direct bond, (D) arginine, (D) lysine substituted with R^{b},

[chemical structure]

[2177] wherein:
   [2178] R^{b} is

[chemical structure]

[2179] R² is H, —CH(CH₃)₂,

[chemical structure]

[2180] wherein:
   [2181] R^{c} is H, or —CH₃;
   [2182] R^{c}′ is H, or —CH₃;
   [2183] R^{d} is

[chemical structure]

[2184] R³ is H, —CH₃,

[chemical structure]

[2185] R⁴ is H, or —CH₃;
[2186] X8 is

[chemical structure]

[2187] wherein:
   [2188] R^{e} is H, or —CH₃;
   [2189] R^{ee} is H;
   [2190] R^{f} is H, —CH₃, —C(CH₃)₃, —C(O)CH₃, —C(O)(CH₂CH₂O)₆CH₃, —(CH₂CH₂O)₆CH₃,

[chemical structure]

[2191] R^{g} is H, —OH, —C(O)NH₂, or —CH₂NHC(O)CH₃;
[2192] n is 0, or 1;
[2193] X12 is absent,

[chemical structure]

[2194] R⁶ is —CH₃—CH₂CH₂C(O)R^{m}, —(CH₂)ₛNⁿR^{o},

[chemical structure]

[2195] R⁷ is H, or —CH₃;
[2196] wherein:
   [2197] R^{m} is —OH, or

[chemical structure]

[2198] Rⁿ is H, —CH₃, —CH₂CH(CH₃)₂, —C(O)CH₃, —C(O)(CH₂CH₂O)₆CH₃, —(CH₂CH₂O)₆CH₃, —C(O)(CH₂CH₂O)ₜCH₂CH₂R^{p},

[chemical structure]

[2199] R^{o} is H, —CH₃, or —C(O)CH₃;
[2200] wherein:
   [2201] R^{p} is NHC(O)CH₃, or

[chemical structure]

[2202] s is 1, 2, or 4;
[2203] t is 2, 6, 9, or 12;
[2204] u is 2 or 3;
[2205] v is 10 or 12;
[2206] R⁸ is —CH₂CH₂CH₂NHC(O)CH₃, —C(O)NH₂, or —C(O)NHCH₃;
[2207] X15 is absent,

[chemical structure]

[2208] X16 is absent,

[chemical structure]

[2209] wherein
   [2210] R^{q} is

[chemical structure]

[2211] R^{r} is H;
[2212] w is 2 4, or 5;
[2213] x is 2 or 4; and
[2214] R⁹ is —NH₂, —NHCH₃, —N(CH₃)₂, —NH(CH₂CH₂O)₂CH₃, —N(CH₃)(CH₂CH₂O)₂CH₃, —NH(CH₂CH₂O)_{y}R^{s},

[chemical structure]

[2215] wherein:
   [2216] y is 2, 4, or 6;
   [2217] R^{s} is —CH₃, or

[chemical structure]

wherein:
[2218] AN⁻as above defined for A, R, X3, X12, R1, R2, R5, R6, R8, R15, R16 and R^{a}, R^{b}, R^{d}, R^{f}, R^{h}, Rⁱ, R^{j}, R^{k}, R^{m}, Rⁿ, R^{o}, R^{s} is acetate, adipate, benzoate, benzenesulfonate, citrate, decanoate, chloride, lactate, maleate, methanesulfonate, oxalate, pivalate, propionate, succinate, sulfate, tartrate, or trifluoroacetate; or
[2219] a pharmaceutically acceptable salt thereof.

[2220] In another aspect of the invention:

[2221] 39. The compound of aspect 14, wherein X15 is 3-pyridyl alanine; or
[2222] a pharmaceutically acceptable salt thereof.

### Enumerated Clauses

[2223] The present disclosure further includes the following enumerated clauses.

### Clause 1

[2224] 1. A compound of Formula (I):

[chemical structure]

[2225] wherein:
[2226] A is

[chemical structure]

[2227] wherein:
   [2228] R^{s} is —OCHF₂, —O(CH₂)₉CO₂H,

[chemical structure]

[2229] wherein:
   [2230] R^{h} is H, —CH₃, —C(O)CH₃, —C(NH)NH₂, —(CH₂)₃O(CH₂)₂OCH₃, —CH₂CH₂OCH₃, —(CH₂CH₂O)₃CH₃, —(CH₂CH₂O)₆CH₃,

[chemical structure]

[2231] Rⁱ is H, —CH₃, —(CH₂)₃O(CH₂)₂OCH₃,

[chemical structure]

[2232] p is 1, 2 or 3;
[2233] R^{j} is

[chemical structure]

[2234] q is 1, 2, 3, 4, or 5;
[2235] R^{k} is —OCH₃,

[chemical structure]

[2236] r is 3, 4, 5, 6, or 8;
[2237] wherein:
   [2238] R^{jj} is H, —(CH₂)₇CH₃, —(CH₂)₁₅CH₃, —(CH₂)₂OCH₃, or —(CH₂CH₂O)₃CH₃;
[2239] R¹ is —C(O)C₍₁₋₂₎alkyl, —C(O)CF₃, —COCH₂CF₃, —CO(CH₂)₅N(CH₃)₃⁺AN⁻, —CH₂CH₂NHC(O)CH₂O(CH₂CH₂O)₂CH₃, —CH₂CH₂NHC(O)(CH₂CH₂O)₆CH₃,

[chemical structure]

[2240] wherein:
   [2241] R^{a} is

[chemical structure]

CH₂CH₂OCH₂CH₂N(CH₃)₂,
[2242] —(CH₂CH₂O)₃CH₂CH₂N(CH₃)₂, —(CH₂CH₂O)₃CH₂CH₂N(CH₃)₃ ⁺AN⁻, —(CH₂CH₂O)₅CH₂CH₂NC(O)CH₃, —(CH₂CH₂O)₈CH₂CH₂NC(O)CH₃, or —(CH₂CH₂O)₁₁CH₂CH₂NC(O)CH₃;
[2243] X3 is a direct bond, (D) arginine, (D) lysine substituted with R^{b},

[chemical structure]

[2244] wherein:
[2245] H
   [2246] R^{b} is

[chemical structure]

[2247] R² is H, —CH(CH₃)₂,

[chemical structure]

[2248] wherein:
   [2249] R^{c} is H, or —CH₃;
   [2250] R^{c}′ is H, or —CH₃;
[2251] R^{d} is

[chemical structure]

[2252] R³ is H, —CH₃, —CF₃, or

[chemical structure]

[2253] R⁴ is H, or —CH₃;
[2254] X8 is

[chemical structure]

[2255] wherein:
   [2256] R^{e} is H, or —CH₃;
   [2257] R^{ee} is H;
   [2258] R^{f} is H, —CH₃, —C(CH₃)₃, —C(O)CH₃, —C(O)(CH₂CH₂O)₆CH₃, —(CH₂CH₂O)₆CH₃,

[chemical structure]

[2259] R^{g} is H, —OH, —C(O)NH₁₂, or —CH₂NHC(O)CH₃;
[2260] n is 0, or 1;
[2261] X12 is absent,

[chemical structure]

[2262] R⁶ is —CH₃, —CH₂CH₂C(O)R^{m}, —(CH₂)ₛNRⁿR^{o},

[chemical structure]

[2263] R⁷ is H, or —CH₃;
[2264] wherein:
   [2265] R^{m} is —OH, or;

[chemical structure]

[2266] Rⁿ is H, —CH₃, —CH₂CH(CH₃)₂, —C(O)CH₃, —C(O)(CH₂CH₂O)₆CH₃, —(CH₂CH₂O)₆CH₃, —C(O)(CH₂CH₂O)ₜCH₂CH₂R^{p},

[chemical structure]

[2267] R^{o} is H, —CH₃, or —C(O)CH₃;
[2268] wherein:
   [2269] R^{p} is NHC(O)CH₃, or

[chemical structure]

[2270] s is 1, 2, or 4;
[2271] t is 2, 6, 9, or 12;
[2272] u is 2 or 3;
[2273] v is 10 or 12;
[2274] R⁸ is —CH₂CH₂CH₂NHC(O)CH₃, —C(O)NH₂, or —C(O)NHCH₃;
[2275] X15 is absent,

[chemical structure]

[2276] X16 is absent,

[chemical structure]

[2277] wherein:
   [2278] R^{q} is

[chemical structure]

[2279] R^{r} is H;
[2280] w is 2 4, or 5;
[2281] x is 2 or 4; and
[2282] R⁹ is —NH₂, —NHCH₃, —N(CH₃)₂, —NH(CH₂CH₂O)₂CH₃, —N(CH₃)(CH₂CH₂O)₂CH₃, NH(CH₂CH₂O)_{y}R^{s},

[chemical structure]

[2283] wherein:
   [2284] y is 2, 4, or 6;
   [2285] R^{s} is —CH₃, or

[chemical structure]

wherein:
[2286] AN⁻as above defined for A, R, X3, X12, R1, R2, R5, R6, R8, R15, R16 and R^{a}, R^{b}, R^{d}, R^{f}, R^{h}, Rⁱ, R^{j}, R^{k}, R^{m}, Rⁿ, R^{o}, R^{s} is acetate, adipate, benzoate, benzenesulfonate, citrate, decanoate, chloride, lactate, maleate, methanesulfonate, oxalate, pivalate, propionate, succinate, sulfate, tartrate, or trifluoroacetate; or a pharmaceutically acceptable salt thereof.

### Clause 2.

[2287] 2. A compound of Formula (II)

[chemical structure]

[2288] wherein
[2289] X12 is absent,

[chemical structure]

or
[2290] a pharmaceutically acceptable salt thereof.

### Clause 3

[2291] 3. The compound of clause 2, wherein:
[2292] wherein:
[2293] A is

[chemical structure]

[2294] wherein:
   [2295] R⁵ is —OCHF₂, —O(CH₂)₉CO₂H,

[chemical structure]

[2296] wherein:
   [2297] R^{h} is H, —CH₃, —C(O)CH₃, —C(NH)NH₂, —(CH₂)₃O(CH₂)₂OCH₃, —CH₂CH₂OCH₃, —(CH₂CH₂O)₃CH₃, —(CH₂CH₂O)₆CH₃,

[chemical structure]

[2298] Rⁱ is H, —CH₃, —(CH₂)₃O(CH₂)₂OCH₃,

[chemical structure]

[2299] p is 1, 2 or 3;
[2300] R^{j} is

[chemical structure]

[2301] q is 1, 2, 3, 4, or 5;
[2302] R^{k} is —OCH₃,

[chemical structure]

[2303] r is 3, 4, 5, 6, or 8;
[2304] wherein:
   [2305] R^{jj} is H, —(CH₂)₇CH₃, —(CH₂)₁₅CH₃, —(CH₂)₂OCH₃, or —(CH₂CH₂O)₃CH₃;
[2306] R¹ is —C(O)C₍₁₋₂₎alkyl, —C(O)CF₃, —COCH₂CF₃, —CO(CH₂)₅N(CH₃)₃⁺Cl⁻, —CH₂CH₂NHC(O)CH₂O(CH₂CH₂O)₂CH₃, —CH₂CH₂NHC(O)(CH₂CH₂O)₆CH₃,

[chemical structure]

[2307] wherein:
   [2308] R^{a} is

[chemical structure]

CH₂CH₂OCH₂CH₂N(CH₃)₂,
[2309] —(CH₂CH₂O)₃CH₂CH₂N(CH₃)₂, —(CH₂CH₂O)₃CH₂CH₂N(CH₃)₃⁺Cl⁻, —(CH₂CH₂O)₅CH₂CH₂NC(O)CH₃, —(CH₂CH₂O)₈CH₂CH₂NC(O)CH₃, or —(CH₂CH₂O)₁₁CH₂CH₂NC(O)CH₃;
[2310] X3 is a direct bond, (D) arginine, (D) lysine substituted with R^{b},

[chemical structure]

[2311] wherein:

[chemical structure]

[2312] R² is H, —CH(CH₃)₂,

[chemical structure]

[2313] wherein:
   [2314] R^{c} is H, or —CH₃
   [2315] R^{c}′ is H, or —CH₃;
   [2316] R^{d} is

[chemical structure]

[2317] R³ is H, —CH₃, —CF₃, or

[chemical structure]

[2318] R⁴ is H, or —CH₃;
[2319] X8 is,

[chemical structure]

[2320] wherein:
   [2321] R^{e} is H, or —CH₃;
   [2322] R^{ee} is H;
   [2323] R^{f} is H, —CH₃, —C(CH₃)₃, —C(O)CH₃, —C(O)(CH₂CH₂O)₆CH₃, —(CH₂CH₂O)₆CH₃,

[chemical structure]

[2324] R^{g} is H, —OH, —C(O)NH₁₂, or —CH₂NHC(O)CH₃;
[2325] n is 0, or 1;
[2326] X12 is absent,

[chemical structure]

[2327] R⁶ is —CH₃, —CH₂CH₂C(O)R^{m}, —(CH₂)ₛNRⁿR^{o},

[chemical structure]

[2328] R⁷ is H, or —CH₃
[2329] wherein:
   [2330] R^{m} is —OH, or

[chemical structure]

[2331] Rⁿ is H, —CH₃, —CH₂CH(CH₃)₂, —C(O)CH₃, —C(O)(CH₂CH₂O)₆CH₃, —(CH₂CH₂O)₆CH₃, —C(O)(CH₂CH₂O)ₜCH₂CH₂R^{p},

[chemical structure]

[2332] R^{o} is H, —CH₃, or —C(O)CH₃;
[2333] wherein:
   [2334] R^{p} is NHC(O)CH₃, or

[chemical structure]

[2335] s is 1, 2, or 4;
[2336] t is 2, 6, 9, or 12;
[2337] u is 2 or 3;
[2338] v is 10 or 12;
[2339] R⁸ is —CH₂CH₂CH₂NHC(O)CH₃, —C(O)NH₂, or —C(O)NHCH₃;
[2340] X15 is absent,

[chemical structure]

[2341] X16 is absent,

[chemical structure]

[2342] wherein:
   [2343] R^{q} is

[chemical structure]

[2344] R^{r} is H;
[2345] w is 24, or 5;
[2346] x is 20r 4; and
[2347] R⁹ is —NH₂, —NHCH₃, —N(CH₃)₂, —NH(CH₂CH₂O)₂CH₃, —N(CH₃)(CH₂CH₂O)₂CH₃, NH(CH₂CH₂O)_{y}R^{s}, 1, or

[chemical structure]

[2348] wherein:
   [2349] y is 2, 4, or 6;
   [2350] R^{s} is —CH₃, or

[chemical structure]

or
[2351] a pharmaceutically acceptable salt thereof.

### Clause 4

[2352] 4. The compound of any of clauses 1 to 3 wherein
[2353] R² is

[chemical structure]

[2354] wherein:
   [2355] R^{c} is —CH₃;
   [2356] R^{c}′ is —CH₃;
   [2357] R^{d} is

[chemical structure]

wherein:
[2358] AN⁻as above defined for A, R, X3, X12, R1, R2, R5, R6, R8, R15, R16 and R^{a}, R^{b}, R^{d}, R^{f}, R^{h}, Rⁱ, R^{j}, R^{k}, R^{m}, Rⁿ, R^{o}, R^{s} is acetate, adipate, benzoate, benzenesulfonate, citrate, decanoate, chloride, lactate, maleate, methanesulfonate, oxalate, pivalate, propionate, succinate, sulfate, tartrate, or trifluoroacetate; or
[2359] a pharmaceutically acceptable salt thereof.

### Clause 5

[2360] 5. A compound according to Formula (III)

[chemical structure]

[2361] wherein:
[2362] A is

[chemical structure]

[2363] wherein:

[chemical structure]

[2364] R⁵ is —OCHF₂, —O(CH₂)₉CO₂H,
[2365] wherein:
   [2366] R^{h} is H, —CH₃, —C(O)CH₃, —C(NH)NH₂, —(CH₂)₃O(CH₂)₂OCH₃, —CH₂CH₂OCH₃, —(CH₂CH₂O)₃CH₃, —(CH₂CH₂O)₆CH₃,

[chemical structure]

[2367] Rⁱ is H, —CH₃, —(CH₂)₃O(CH₂)₂OCH₃,

[chemical structure]

[2368] p is 1, 2 or 3;
[2369] R^{j} is

[chemical structure]

[2370] q is 1, 2, 3, 4, or 5;
[2371] R^{k} is —OCH₃,

[chemical structure]

[2372] r is 3, 4, 5, 6, or 8;
[2373] wherein:
   [2374] R^{jj} is H, —(CH₂)₇CH₃, —(CH₂)₁₅CH₃, —(CH₂)₂OCH₃, or —(CH₂CH₂O)₃CH₃;
[2375] R¹ is —C(O)C₍₁₋₂₎alkyl, —C(O)CF₃, —COCH₂CF₃, —CO(CH₂)₅N(CH₃)₃⁺AN⁻, —CH₂CH₂NHC(O)CH₂O(CH₂CH₂O)₂CH₃, —CH₂CH₂NHC(O)(CH₂CH₂O)₆CH₃,

[chemical structure]

[2376] wherein:
   [2377] R^{a} is

[chemical structure]

CH₂CH₂OCH₂CH₂N(CH₃)₂,
[2378] —(CH₂CH₂O)₃CH₂CH₂N(CH₃)₂, —(CH₂CH₂O)₃CH₂CH₂N(CH₃)₃ ⁺AN⁻, —(CH₂CH₂O)₅CH₂CH₂NC(O)CH₃, —(CH₂CH₂O)₈CH₂CH₂NC(O)CH₃, or —(CH₂CH₂O)₁₁CH₂CH₂NC(O)CH₃;
[2379] X3 is a direct bond, (D) arginine, (D) lysine substituted with R^{b},

[chemical structure]

[2380] wherein:
   [2381] R^{b} is

[chemical structure]

[2382] R³ is H, —CH₃, —CF₃, or

[chemical structure]

[2383] R⁴ is H, or —CH₃;
[2384] X8 is

[chemical structure]

[2385] wherein:
   [2386] R^{e} is H, or —CH₃;
   [2387] R^{ee} is H;
   [2388] R^{f} is H, —CH₃, —C(CH₃)₃, —C(O)CH₃, —C(O)(CH₂CH₂O)₆CH₃,

[chemical structure]

[2389] R^{g} is H, —OH, —C(O)NH₂, or —CH₂NHC(O)CH₃;
[2390] n is 0, or 1;
[2391] X12 is absent

[chemical structure]

[2392] R⁶ is —CH₃, —CH₂CH₂C(O)R, —(CH₂)ₛNRⁿR^{o},

[chemical structure]

[2393] R⁷ is H, or —CH₃;
[2394] wherein:
   [2395] R^{m} is —OH, or

[chemical structure]

[2396] Rⁿ is H, —CH₃, —CH₂CH(CH₃)₂, —C(O)CH₃, —C(O)(CH₂CH₂O)₆CH₃, —(CH₂CH₂O)₆CH₃, —C(O)(CH₂CH₂O)ₜCH₂CH₂R^{p},

[chemical structure]

[2397] R^{o} is H, —CH₃, or —C(O)CH₃;
[2398] wherein:
   [2399] R^{p} is NHC(O)CH₃, or

[chemical structure]

[2400] s is 1,2, or 4;
[2401] t is 2, 6, 9, or 12;
[2402] u is 2 or 3;
[2403] v is 10 or 12;
[2404] R⁸ is —CH₂CH₂CH₂NHC(O)CH₃, —C(O)NH₂, or —C(O)NHCH₃;
[2405] X15 is absent,

[chemical structure]

[2406] X16 is absent,

[chemical structure]

[2407] wherein:
   [2408] R^{q} is

[chemical structure]

[2409] R^{r} is H;
[2410] w is 2 4, or 5;
[2411] x is 2 or 4; and
[2412] R⁹ is —NH₂, —NHCH₃, —N(CH₃)₂, —NH(CH₂CH₂O)₂CH₃, —N(CH₃)(CH₂CH₂O)₂CH₃, —NH(CH₂CH₂O)_{y}R^{s},

[chemical structure]

[2413] wherein:
   [2414] y is 2, 4, or 6;
   [2415] R^{s} is —CH₃, or

[chemical structure]

wherein:
[2416] AN⁻as above defined for A, R, X3, X12, R1, R2, R5, R6, R8, R15, R16 and R^{a}, R^{b}, R^{d}, R^{f}, R^{h}, Rⁱ, R^{j}, R^{k}, R^{m}, Rⁿ, R^{o}, R^{s} is acetate, adipate, benzoate, benzenesulfonate, citrate, decanoate, chloride, lactate, maleate, methanesulfonate, oxalate, pivalate, propionate, succinate, sulfate, tartrate, or trifluoroacetate; or
[2417] a pharmaceutically acceptable salt thereof.

### Clause 6

[2418] 6. The compound of clause 5 wherein
[2419] A is

[chemical structure]

[2420] wherein:
   [2421] AN⁻as above defined for A, R, X3, X12, R1, R2, R5, R6, R8, R15, R16 and R^{a}, R^{b}, R^{d}, R^{f}, R^{h}, Rⁱ, R^{j}, R^{k}, R^{m}, Rⁿ, R^{o}, R^{s} is acetate, adipate, benzoate, benzenesulfonate, citrate, decanoate, chloride, lactate, maleate, methanesulfonate, oxalate, pivalate, propionate, succinate, sulfate, tartrate, or trifluoroacetate; or
[2422] a pharmaceutically acceptable salt thereof.

### Clause 7

[2423] 7. The compound of clause 5 wherein
[2424] A is

[chemical structure]

[2425] wherein:
   [2426] AN⁻as above defined for A, R, X3, X12, R1, R2, R5, R6, R8, R15, R16 and R^{a}, R^{b}, R^{d}, R^{f}, R^{h}, Rⁱ, R^{j}, R^{k}, R^{m}, Rⁿ, R^{o}, R^{s} is acetate, adipate, benzoate, benzenesulfonate, citrate, decanoate, chloride, lactate, maleate, methanesulfonate, oxalate, pivalate, propionate, succinate, sulfate, tartrate, or trifluoroacetate; or
[2427] a pharmaceutically acceptable salt thereof.

### Clause 8

[2428] 8. The compound of clause 6 wherein
[2429] X8 is

[chemical structure]

[2430] wherein:
   [2431] AN⁻as above defined for A, R, X3, X12, R1, R2, R5, R6, R8, R15, R16 and R^{a}, R^{b}, R^{d}, R^{f}, R^{h}, Rⁱ, R^{j}, R^{k}, R^{m}, Rⁿ, R^{o}, R^{s} is acetate, adipate, benzoate, benzenesulfonate, citrate, decanoate, chloride, lactate, maleate, methanesulfonate, oxalate, pivalate, propionate, succinate, sulfate, tartrate, or trifluoroacetate; or
[2432] a pharmaceutically acceptable salt thereof.
   Clause 9. 9. The compound of clause 5 selected from
[2433] cPEG3aCO-Pen(3)—N(N(Me)2)-T-7MeW—K(NMeAc)-Pen(3)-TMAPF-2Nal-THP-K(NMeAc)—N-3Pya-Sar-CO(NHPEG3a);
[2434] MeCO-Pen(3)—N(N(Me)2)-T-7MeW—K(NMeAc)-Pen(3)-TMAPF-2Nal-THP-K(NMeAc)—N-3Pya-Sar-CO(NHPEG3a);
[2435] cPEG3aCO-Pen(3)—N(N(Me)2)-T-7MeW—K(NMeAc)-Pen(3)-APEG3F-2Nal-THP-A-N-3Pya-Sar-CON(Me)2;
[2436] cPEG3aCO-Pen(3)—N(N(Me)2)-T-7MeW—K(NMeAc)-Pen(3)-TMAPF-2Nal-THP-A-N-3Pya-Sar-CON(Me)2;
[2437] MeCO-Pen(3)—N(N(Me)2)-T-7MeW-Dab(NMeAc)-Pen(3)-AEF-2Nal-THP-AIB-N-3Pya-Sar-CON(Me)2;
[2438] cPEG3aCO-Pen(3)—N(N(Me)2)-T-7MeW-AIB-Pen(3)-AEF-2Nal-THP-AIB-N-3Pya-Sar-CON(Me)2;
[2439] MeCO-Pen(3)—N(N(Me)2)-T-7MeW—K(NMeAc)-Pen(3)-TMAPF-2Nal-THP-APEG2Ser-N-3Pya-Sar-CON(Me)2;
[2440] MeCO-Pen(3)—N(N(Me)2)-T-7MeW-APEG2Ser(S*)-Pen(3)-APEG3F-2Nal-THP-APEG2Ser(S*)—N-3Pya-Sar-CON(Me)2;
[2441] MeCO-Pen(3)—N(N(Me)2)-T-7MeW-APEG2Ser(R*)-Pen(3)-APEG3F-2Nal-THP-APEG2Ser(S*)—N-3Pya-Sar-CON(Me)2;
[2442] MeCO-Pen(3)—N(N(Me)2)-T-7MeW—K(NMeAc)-Pen(3)-APEG3F-2Nal-THP-APEG2Ser(S*)—N-3Pya-Sar-CON(Me)2;
[2443] cPEG3aCO-Pen(3)—N(N(Me)2)-T-7MeW—K(NMeAc)-Pen(3)-TMAPF-2Nal-THP-Cit-N-3Pya-Sar-CON(Me)2;
[2444] cPEG3aCO-Pen(3)—N(N(Me)2)-T-7MeW—K(NMeAc)-Pen(3)-AEF-2Nal-diFCpx-Dab(NMeAc)—N-3Pya-Sar-CON(Me)2;
[2445] cPEG3aCO-Pen(3)—N(N(Me)2)-T-7MeW—K(NMeAc)-Pen(3)-AEF-2Nal-diFCpx-Dab(NMeAc)—N-3Pya-Sar-CON(Me)2;
[2446] cPEG3aCO-Pen(3)—N(N(Me)2)-T-7MeW—K(Ac)-Pen(3)-TMAPF-2Nal-THP-Dab(NMeAc)—N-3Pya-Sar-CON(Me)2;
[2447] cPEG3aCO-Pen(3)—N(N(Me)2)-T-7MeW—K(NMeAC)-Pen(3)-TMAPF-2Nal-THP-Dab(NMeAc)—N-3Pya-Sar-CON(Me)2;
[2448] MeCO-Pen(3)—N(N(Me)2)-T-7MeW-Dab(NMecarn)-Pen(3)-APEG3F-2Nal-THP-Dab(NMeAc)—N-3Pya-Sar-CON(Me)2;
[2449] MeCO-k(d)-Pen(3)—N(N(Me)2)-T-7MeW—K(NMeAc)-Pen(3)-APEG3F-2Nal-THP-Dab(NMeAc)—N-3Pya-Sar-CON(Me)2;
[2450] cPEG3aCO-Pen(3)—N(N(Me)2)-T-7MeW—K(NMeAc)-Pen(3)-APEG3F-2Nal-THP-Dab(NMeAc)—N-3Pya-Sar-CON(Me)2;
[2451] cPEG3aCO-Pen(3)—N(N(Me)2)-T-7MeW—K(NMeAc)-Pen(3)-APEG3F-2Nal-THP-Dab(NMeAc)—N-3Pya-Sar-CON(Me)2;
[2452] mPEG3CO-SP6-Pen(3)—N(N(Me)2)-T-7MeW—K(NMeAc)-Pen(3)-APEG3F-2Nal-THP-Dab(NMeAc)—N-3Pya-Sar-CON(Me)2;
[2453] cPEG3aCO-Pen(3)—N(N(Me)2)-T-7MeW-Dab(NMecPEG3a)-Pen(3)-AEF-2Nal-THP-Dab(NMeAc)—N-3Pya-Sar-CON(Me)2;
[2454] cPEG3aCO-Pen(3)—N(N(Me)2)-T-7MeW—K(NMeAc)-Pen(3)-AEF-2Nal-THP-Dab(NMeAc)—N-3Pya-Sar-CON(Me)2;
[2455] cPEG5aCO-Pen(3)—N(N(Me)2)-T-7MeW-Q(N(Me)2)-Pen(3)-AEF-2Nal-THP-Dab(NMeAc)—N-3Pya-Sar-CON(Me)2;
[2456] MeCO-Pen(3)—N(N(Me)2)-T-7MeW-Dab(NMeAc)-Pen(3)-AEF-2Nal-THP-Dab(NMeAc)—N-3Pya-Sar-CON(Me)2;
[2457] cPEG3aCO-Pen(3)—N(N(Me)2)-T-7MeW-Dab(NMeAc)-Pen(3)-AEF-2Nal-THP-Dab(NMeAc)—N-3Pya-Sar-CON(Me)2;
[2458] cPEG3aCO-Pen(3)—N(N(Me)2)-T-7MeW-Q(N(Me)2)-Pen(3)-AEF-2Nal-THP-Dab(NMeAc)—N-3Pya-Sar-CON(Me)2;
[2459] cPEG5aCO-Pen(3)—N(N(Me)2)-T-7MeW-Dab(NMeAc)-Pen(3)-AEF-2Nal-THP-Dab(NMeAc)—N-3Pya-Sar-CON(Me)2;
[2460] MeCO-Pen(3)—N(N(Me)2)-T-7MeW-Dab(NMecarn)-Pen(3)-APEG3F-2Nal-THP-Dab(NMecarn)-N-3Pya-Sar-CON(Me)2;
[2461] MeCO-Pen(3)—N(N(Me)2)-T-7MeW-Dab(NMeCOmPEG6)-Pen(3)-AEF-2Nal-THP-Dab(NMeCOmPEG6)—N-3Pya-Sar-CON(Me)2;
[2462] cPEG5aCO-Pen(3)—N(N(Me)2)-T-7MeW-Dab(NMecPEG2a)-Pen(3)-AEF-2Nal-THP-Dab(NMecPEG2a)—N-3Pya-Sar-CON(Me)2;
[2463] MeCO-Pen(3)—N(N(Me)2)-T-7MeW-Dab(NMecPEG3a)-Pen(3)-AEF-2Nal-THP-Dab(NMecPEG3a)—N-3Pya-Sar-CON(Me)2;
[2464] 5cpaCO-Pen(3)—N(N(Me)2)-T-7MeW—K(NMeAc)-Pen(3)-AEF(N(Me)2)-2Nal-THP-Dap(Ac)—N-3Pya-Sar-CON(Me)2;
[2465] MeCO-Pen(3)—N(N(Me)2)-T-7MeW—K(NMeAc)-Pen(3)-AEF(N(Me)2)-2Nal-THP-Dap(Ac)—N-3Pya-Sar-CON(Me)2;
[2466] cPEG3aCO-Pen(3)—N(N(Me)2)-T-7MeW—K(NMeAc)-Pen(3)-APEG3F-2Nal-THP-Dap(NMeAc)—N-3Pya-Sar-CON(Me)2;
[2467] cPEG3aCO-Pen(3)—N(N(Me)2)-T-7MeW—K(Ac)-Pen(3)-TMAPF-2Nal-THP-Dap(NMeAc)—N-3Pya-Sar-CON(Me)2;
[2468] cPEG3aCO-Pen(3)—N(N(Me)2)-T-7MeW—K(NMeAc)-Pen(3)-APEG3F-2Nal-THP-E-N-3Pya-Sar-CON(Me)2;
[2469] cPEG3aCO-Pen(3)—N(N(Me)2)-T-7MeW-Dab(NMeAc)-Pen(3)-AEF-2Nal-THP-E-N-3Pya-Sar-CONH2;
[2470] cPEG3aCO-Pen(3)—N(N(Me)2)-T-7MeW—K(NMeAc)-Pen(3)-TMAPF-2Nal-THP-E-N-3Pya-Sar-CON(Me)2;
[2471] MeCO-hk(Me)₃-Pen(3)—N(N(Me)2)-T-7MeW—K(NMeAc)-Pen(3)-AEF-2Nal-THP-E-N-3Pya-Sar-CON(Me)2;
[2472] MeCO-Pen(3)—N(N(Me)2)-T-7MeW-Dab(NMeCOmPEG6)-Pen(3)-AEF-2Nal-THP-E-N-3Pya-Sar-CON(Me)2;
[2473] MeCO-Pen(3)—N(N(Me)2)-T-7MeW-Dab(NMeCarn)-Pen(3)-AEF-2Nal-THP-E-N-3Pya-Sar-CON(Me)2;
[2474] cPEG5aCO-Pen(3)—N(N(Me)2)-T-7MeW-Dab(NMecPEG5a)-Pen(3)-AEF-2Nal-THP-E-N-3Pya-Sar-CON(Me)2;
[2475] mPEG6CO-SP6-Pen(3)—N(N(Me)2)-T-7MeW-Dab(NMecPEG5a)-Pen(3)-AEF-2Nal-THP-E-N-3Pya-Sar-CON(Me)2;
[2476] MeCO-Pen(3)—N(N(Me)2)-T-7MeW-Dab(NMecarn)-Pen(3)-AEF-2Nal-THP-E-N-3Pya-Sar-CON(Me)2;
[2477] MeCO-Pen(3)—N(N(Me)2)-T-7MeW-Dab(NMecPEG2a)-Pen(3)-AEF-2Nal-THP-E-N-3Pya-Sar-CON(Me)2;
[2478] MeCO-Pen(3)—N(N(Me)2)-T-7MeW-Dab(NMeAc)-Pen(3)-AEF-2Nal-THP-E-N-3Pya-Sar-CON(Me)2;
[2479] MeCO-Pen(3)—N(N(Me)2)-T-7MeW-Q(N(Me)2)-Pen(3)-AEF(N(Me)2)-2Nal-THP-E-N-3Pya-Sar-CON(Me)2;
[2480] MeCO-Pen(3)—N(N(Me)2)-T-7MeW—K(NMeAc)-Pen(3)-AEF(N(Me)2)-2Nal-THP-E-N-3Pya-Sar-CON(Me)2;
[2481] MeCO-k(Me)₃-Pen(3)—N(N(Me)2)-T-7MeW—K(NMeAc)-Pen(3)-AEF(N(Me)2)-2Nal-THP-E-N-3Pya-Sar-CON(Me)2;
[2482] CF3CO-Pen(3)—N(N(Me)2)-T-7MeW—K(NMeAc)-Pen(3)-AEF(N(Me)2)-2Nal-THP-E-N-3Pya-Sar-CON(Me)2;
[2483] 5cpaCO-Pen(3)—N(N(Me)2)-T-7MeW-Q(N(Me)2)-Pen(3)-AEF(N(Me)2)-2Nal-THP-E-N-3Pya-Sar-CON(Me)2;
[2484] CF3CO—K(Me)₃-Pen(3)—N(N(Me)2)-T-7MeW—K(NMeAc)-Pen(3)-AEF(N(Me)2)-2Nal-THP-E-N-3Pya-Sar-CON(Me)2;
[2485] cPEG3aCO-Pen(3)—N(N(Me)2)-T-7MeW—K(NMeAc)-Pen(3)-APEG3F-2Nal-THP—F—N-3Pya-Sar-CON(Me)2;
[2486] cPEG3aCO-Pen(3)—N(N(Me)2)-T-7MeW—K(NMeAc)-Pen(3)-APEG3F-2Nal-THP—K(Ac)—N-3Pya-Sar-CON(Me)2;
[2487] MeCO-Pen(3)—N(N(Me)2)-T-7MeW—K(Me)₃-Pen(3)-AEF(N(Me)2)-2Nal-THP-K(Me)₃—N-3Pya-Sar-CON(Me)2;
[2488] cPEG3aCO-Pen(3)—N(N(Me)2)-T-7MeW—K(NMeAc)-Pen(3)-TMAPF-2Nal-Achx-K(NMeAc)—N-3Pya-Sar-CON(Me)2;
[2489] cPEG3aCO-Pen(3)—N(N(Me)2)-T-7MeW—K(NMeAc)-Pen(3)-TMAPF-2Nal-Acpx-K(NMeAc)—N-3Pya-Sar-CON(Me)2;
[2490] cPEG3aCO-Pen(3)—N(N(Me)2)-T-7MeW—K(NMeAc)-Pen(3)-TMAPF-2Nal-Aib-K(NMeAc)—N-3Pya-Sar-CON(Me)2;
[2491] cPEG3aCO-Pen(3)—N(N(Me)2)-T-7MeW—K(NMeAc)-Pen(3)-TMAPF-2Nal-Chg-K(NMeAc)—N-3Pya-Sar-CON(Me)2;
[2492] cPEG3aCO-Pen(3)—N(N(Me)2)-T-7MeW—K(NMeAc)-Pen(3)—Y(OTz1TMA4)-2Nal-THP-K(NMeAc)—N-3Pya-Sar-CON(Me)2;
[2493] cPEG3aCO-Pen(3)—N(N(Me)2)-T-7(3NAcPh)W—K(NMeAc)-Pen(3)-MMoEF-2Nal-THP-K(NMeAc)—N-3Pya-Sar-CON(Me)2;
[2494] cPEG3aCO-Pen(3)—N(N(Me)2)-T-7MeW-Dap(NMeAc)-Pen(3)-TMAPF-2Nal-THP-K(NMeAc)—N-3Pya-Sar-CON(Me)2;
[2495] cPEG2gCO-Pen(3)—N(N(Me)2)-T-7MeW—K(NMeAc)-Pen(3)-APEG3F-2Nal-THP-K(NMeAc)—N-3Pya-Sar-CON(Me)2;
[2496] cPEG3gCO-Pen(3)—N(N(Me)2)-T-7MeW—K(NMeAc)-Pen(3)-APEG3F-2Nal-THP-K(NMeAc)—N-3Pya-Sar-CON(Me)2;
[2497] cPEG3aCO-Pen(3)—N(N(Me)2)-T-7MeW—K(NMeAc)-Pen(3)-GPEG3F-2Nal-THP-K(NMeAc)—N-3Pya-Sar-CON(Me)2;
[2498] 4cpgCO-Pen(3)—N(N(Me)2)-T-7MeW—K(NMeAc)-Pen(3)-TMAPF-2Nal-THP-K(NMeAc)—N-3Pya-Sar-CON(Me)2;
[2499] cPEG3aCO-Pen(3)—N(N(Me)2)-T-7MeW—K(PEG2PEG2gEC14)-Pen(3)-TMAPF-2Nal-THP-K(NMeAc)—N-3Pya-Sar-CON(Me)2;
[2500] cPEG3aCO-Pen(3)—N(N(Me)2)-T-7MeW—K(4cpg)-Pen(3)-TMAPF-2Nal-THP-K(NMeAc)—N-3Pya-Sar-CON(Me)2;
[2501] cPEG3gCO-Pen(3)—N(N(Me)2)-T-7MeW—K(NMeAc)-Pen(3)-TMAPF-2Nal-THP-K(NMeAc)—N-3Pya-Sar-CON(Me)2;
[2502] cPEG2gCO-Pen(3)—N(N(Me)2)-T-7MeW—K(NMeAc)-Pen(3)-TMAPF-2Nal-THP-K(NMeAc)—N-3Pya-Sar-CON(Me)2;
[2503] C14gEPEG2PEG2CO-k(PEG2PEG2gEC14)-Pen(3)—N(N(Me)2)-T-7MeW-Dab(NMeAc)-Pen(3)-TMAPF-2Nal-THP-K(NMeAc)—N-3Pya-Sar-CON(Me)2;
[2504] C12gEPEG2PEG2CO-k(PEG2PEG2gEC12)-Pen(3)—N(N(Me)2)-T-7MeW-Dab(NMeAc)-Pen(3)-TMAPF-2Nal-THP-K(NMeAc)—N-3Pya-Sar-CON(Me)2;
[2505] cPEG3aCO-Pen(3)—N(N(Me)2)-T-7MeW—K(cPEG3a)-Pen(3)-TMAPF-2Nal-THP-K(NMeAc)—N-3Pya-Sar-CON(Me)2;
[2506] cPEG3aCO-k(PEG2PEG2gEC12)-Pen(3)—N(N(Me)2)-T-7MeW—K(PEG2PEG2gEC12)-Pen(3)-TMAPF-2Nal-THP-K(NMeAc)—N-3Pya-Sar-CON(Me)2;
[2507] cPEG3aCO-k(PEG2PEG2gEC14)-Pen(3)—N(N(Me)2)-T-7MeW—K(NMeAc)-Pen(3)-TMAPF-2Nal-THP-K(NMeAc)—N-3Pya-Sar-CON(Me)2;
[2508] cPEG3aCO-k(PEG2PEG2gEC12)-Pen(3)—N(N(Me)2)-T-7MeW—K(NMeAc)-Pen(3)-TMAPF-2Nal-THP-K(NMeAc)—N-3Pya-Sar-CON(Me)2;
[2509] C14gEPEG2PEG2CO-APEG2Ser(S*)-Pen(3)—N(N(Me)2)-T-7MeW—K(PEG2PEG2gEC14)-Pen(3)-APEG3F-2Nal-THP-K(NMeAc)—N-3Pya-Sar-CON(Me)2;
[2510] C12gEPEG2PEG2CO-APEG2Ser(S*)-Pen(3)—N(N(Me)2)-T-7MeW—K(PEG2PEG2gEC12)-Pen(3)-APEG3F-2Nal-THP-K(NMeAc)—N-3Pya-Sar-CON(Me)2;
[2511] C14gEPEG2PEG2CO-APEG2Ser(S*)-Pen(3)—N(N(Me)2)-T-7MeW—K(NMeAc)-Pen(3)-APEG3F-2Nal-THP-K(NMeAc)—N-3Pya-Sar-CON(Me)2;
[2512] C12gEPEG2PEG2CO-APEG2Ser(S*)-Pen(3)—N(N(Me)2)-T-7MeW—K(NMeAc)-Pen(3)-APEG3F-2Nal-THP-K(NMeAc)—N-3Pya-Sar-CON(Me)2;
[2513] cPEG3aCO-Pen(3)—N(N(Me)2)-T-7MeW-Dab(NMeAc)-Pen(3)-TMAPF-2Nal-THP-K(NMeAc)—N-3Pya-Sar-CON(Me)2;
[2514] cPEG3aCO-Pen(3)—N(N(Me)2)-T-7MeW-Cit-Pen(3)-TMAPF-2Nal-THP-K(NMeAc)—N-3Pya-Sar-CON(Me)2;
[2515] MeCO-r-Pen(3)—N(N(Me)2)-T-7MeW—K(NMeAc)-Pen(3)-TMAPF-2Nal-THP-K(NMeAc)—N-3Pya-Sar-CON(Me)2;
[2516] MeCO-hk(Me)₃-Pen(3)—N(N(Me)2)-T-7MeW—K(NMeAc)-Pen(3)-TMAPF-2Nal-THP-K(NMeAc)—N-3Pya-Sar-CON(Me)2;
[2517] 5cpaCO-Pen(3)—N(N(Me)2)-T-7MeW—K(NMeAc)-Pen(3)-TMAPF-2Nal-THP-K(NMeAc)—N-3Pya-Sar-CON(Me)2;
[2518] cPEG3aCO-Pen(3)—N(N(Me)2)-T-7MeW—K(NMeAc)-Pen(3)-hFTMAPF-2Nal-THP-K(NMeAc)—N-3Pya-Sar-CON(Me)2;
[2519] cPEG3aCO-Pen(3)—N(N(Me)2)-T-7MeW—K(NMeAc)-Pen(3)—F(4Tz1DMA4mPEG)-2Nal-THP-K(NMeAc)—N-3Pya-Sar-CON(Me)2;
[2520] cPEG3aCO-Pen(3)—N(N(Me)2)-T-7MeW—K(NMeAc)-Pen(3)—F(4Tz1MMo4)-2Nal-THP-K(NMeAc)—N-3Pya-Sar-CON(Me)2;
[2521] cPEG3aCO-Pen(3)—N(N(Me)2)-T-7MeW—K(NMeAc)-Pen(3)—F(4Tz1TMA5)-2Nal-THP-K(NMeAc)—N-3Pya-Sar-CON(Me)2;
[2522] cPEG3aCO-Pen(3)—N(N(Me)2)-T-7MeW—K(NMeAc)-Pen(3)—F(4Tz1TMA3)-2Nal-THP-K(NMeAc)—N-3Pya-Sar-CON(Me)2;
[2523] cPEG3aCO-Pen(3)—N(N(Me)2)-T-7MeW—K(NMeAc)-Pen(3)—F(4Tz1TMA2)-2Nal-THP-K(NMeAc)—N-3Pya-Sar-CON(Me)2;
[2524] cPEG3aCO-Pen(3)—N(N(Me)2)-T-7MeW—K(NMeAc)-Pen(3)—F(4Tz1TMA1)-2Nal-THP-K(NMeAc)—N-3Pya-Sar-CON(Me)2;
[2525] cPEG3aCO-Pen(3)—N(N(Me)2)-T-7MeW—K(NMeAc)-Pen(3)—F(4N3)-2Nal-THP-K(NMeAc)—N-3Pya-Sar-CON(Me)2;
[2526] cPEG3aCO-Pen(3)—N(N(Me)2)-T-7MeW—K(Me)₃-Pen(3)-TMAPF-2Nal-THP-K(NMeAc)—N-3Pya-Sar-CON(Me)2;
[2527] C14gEPEG2PEG2CO-hk(Me)₃-Pen(3)—N(N(Me)2)-T-7MeW—K(PEG2PEG2gEC14)-Pen(3)-TMAPF-2Nal-THP-K(NMeAc)—N-3Pya-Sar-CON(Me)2;
[2528] C14gEPEG2PEG2CO-hk(Me)₃-Pen(3)—N(N(Me)2)-T-7MeW—K(NMeAc)-Pen(3)-TMAPF-2Nal-THP-K(NMeAc)—N-3Pya-Sar-CON(Me)2;
[2529] C12gEPEG2PEG2CO-hk(Me)₃-Pen(3)—N(N(Me)2)-T-7MeW—K(PEG2PEG2gEC12)-Pen(3)-TMAPF-2Nal-THP-K(NMeAc)—N-3Pya-Sar-CON(Me)2;
[2530] C12gEPEG2PEG2CO-hk(Me)₃-Pen(3)—N(N(Me)2)-T-7MeW—K(NMeAc)-Pen(3)-TMAPF-2Nal-THP-K(NMeAc)—N-3Pya-Sar-CON(Me)2;
[2531] cPEG3aCO-Pen(3)—N(N(Me)2)-T-7MeW—K(NMeAc)-Pen(3)-AEF(N(Me)2)-2Nal-THP-K(NMeAc)—N-3Pya-Sar-CON(Me)2;
[2532] cPEG3aCO-Pen(3)—N(N(Me)2)-T-7MeW—K(NMeAc)-Pen(3)-AEF-2Nal-THP-K(NMeAc)—N-3Pya-Sar-CON(Me)2;
[2533] MeCO-APEG2Ser(S*)-Pen(3)—N(N(Me)2)-T-7MeW—K(NMeAc)-Pen(3)-APEG3F-2Nal-THP-K(NMeAc)—N-3Pya-Sar-CON(Me)2;
[2534] MeCO-APEG2Ser(R*)-Pen(3)—N(N(Me)2)-T-7MeW—K(NMeAc)-Pen(3)-APEG3F-2Nal-THP-K(NMeAc)—N-3Pya-Sar-CON(Me)2;
[2535] cPEG3aCO-Pen(3)—N(N(Me)2)-T-7MeW-Q(N(Me)2)-Pen(3)-TMAPF-2Nal-THP-K(NMeAC)—N-3Pya-Sar-CON(Me)2;
[2536] cPEG3aCO-Pen(3)—N(N(Me)2)-T-7MeW—K(NMeAc)-Pen(3)—Y(OZOXIMECh)-2Nal-THP-K(NMeAc)—N-3Pya-Sar-CON(Me)2;
[2537] cPEG3aCO-Pen(3)—N(N(Me)2)-T-7MeW—K(NMeAc)-Pen(3)—Y(OEOXIMECh)-2Nal-THP-K(NMeAc)—N-3Pya-Sar-CON(Me)2;
[2538] cPEG3aCO-Pen(3)—N(N(Me)2)-T-7MeW—K(NMeAc)-Pen(3)—F(4G)-2Nal-THP-K(NMeAc)—N-3Pya-Sar-CON(Me)2;
[2539] cPEG3aCO-Pen(3)—N(N(Me)2)-T-7MeW—K(NMeAc)-Pen(3)—F(4Tz1MME)-2Nal-THP-K(NMeAc)—N-3Pya-Sar-CON(Me)2;
[2540] cPEG3aCO-Pen(3)—N(N(Me)2)-T-7MeW—K(NMeAc)-Pen(3)—F(4Tz1TMA4)-2Nal-THP-K(NMeAc)—N-3Pya-Sar-CON(Me)2;
[2541] cPEG3aCO-Pen(3)—N(N(Me)2)-T-7MeW—K(NMeAc)-Pen(3)-dFPPEG3F-2Nal-THP-K(NMeAc)—N-3Pya-Sar-CON(Me)2;
[2542] cPEG3aCO-Pen(3)—N(N(Me)2)-T-7MeW—K(NMeAc)-Pen(3)-NPyPEG3F-2Nal-THP-K(NMeAc)—N-3Pya-Sar-CON(Me)2;
[2543] cPEG3aCO-Pen(3)—N(N(Me)2)-T-7MeW—K(NMeAc)-Pen(3)-TMA8F-2Nal-THP-K(NMeAc)—N-3Pya-Sar-CON(Me)2;
[2544] cPEG3aCO-Pen(3)—N(N(Me)2)-T-7(3NAcPh)W—K(NMeAc)-Pen(3)-TMAPF-2Nal-THP-K(NMeAc)—N-3Pya-Sar-CON(Me)2;
[2545] cPEG3aCO-Pen(3)—N(N(Me)2)-T-7MeW—K(NMeAc)-Pen(3)-TMA6F-2Nal-THP-K(NMeAc)—N-3Pya-Sar-CON(Me)2;
[2546] cPEG3aCO-Pen(3)—N(N(Me)2)-T-7MeW—K(NMeAc)-Pen(3)-Diazabiclyclooctane6F-2Nal-THP-K(NMeAc)—N-3Pya-Sar-CON(Me)2;
[2547] cPEG3aCO-Pen(3)—N(N(Me)2)-T-7MeW—K(NMeAc)-Pen(3)—Y(OTzlChC16)-2Nal-THP-K(NMeAc)—N-3Pya-Sar-CON(Me)2;
[2548] cPEG3aCO-Pen(3)—N(N(Me)2)-T-7MeW—K(NMeAc)-Pen(3)—Y(OTzlC1 aC8)-2Nal-THP-K(NMeAc)—N-3Pya-Sar-CON(Me)2;
[2549] cPEG3aCO-Pen(3)—N(N(Me)2)-T-7MeW—K(NMeAc)-Pen(3)-TzlChmPEG3-2Nal-THP-K(NMeAc)—N-3Pya-Sar-CON(Me)2;
[2550] cPEG3aCO-Pen(3)—N(N(Me)2)-T-7MeW—K(NMeAc)-Pen(3)-TzlChmPEG-2Nal-THIP-K(NMeAc)—N-3Pya-Sar-CON(Me)2;
[2551] cPEG3aCO-Pen(3)—N(N(Me)2)-T-7MeW—K(NMeAc)-Pen(3)-Tzl(Ch)-2Nal-THP-K(NMeAc)—N-3Pya-Sar-CON(Me)2;
[2552] cPEG3aCO-Pen(3)—N(N(Me)2)-T-7MeW—K(NMeAc)-Pen(3)—Y(OTzlCh)-2Nal-THIP-K(NMeAc)—N-3Pya-Sar-CON(Me)2;
[2553] cPEG3aCO-Pen(3)—N(N(Me)2)-T-7MeW—K(NMeAc)-Pen(3)—Y(OTzlChmPEG)-2Nal-THP-K(NMeAc)—N-3Pya-Sar-CON(Me)2;
[2554] cPEG3aCO-Pen(3)—N(N(Me)2)-T-7MeW—K(NMeAc)-Pen(3)—Y(OTz1TMA4)-2Nal-THP-K(NMeAc)—N-3Pya-Sar-CON(Me)2;
[2555] cPEG3aCO-Pen(3)—N(N(Me)2)-T-7MeW—K(NMeAc)-Pen(3)—Y(OTzlChmPEG3)-2Nal-THP-K(NMeAc)—N-3Pya-Sar-CON(Me)2;
[2556] cPEG3aCO-Pen(3)—N(N(Me)2)-T-7MeW—K(NMeAc)-Pen(3)-AEF(SPD)-2Nal-THP-K(NMeAc)—N-3Pya-Sar-CON(Me)2;
[2557] cPEG3aCO-Pen(3)—N(N(Me)2)-T-7MeW—K(NMeAc)-Pen(3)-MMoPF-2Nal-THIP-K(NMeAc)—N-3Pya-Sar-CON(Me)2;
[2558] cPEG3aCO-Pen(3)—N(N(Me)2)-T-7MeW—K(NMeAc)-Pen(3)-PiperazinequatF-2Nal-THP-K(NMeAc)—N-3Pya-Sar-CON(Me)2;
[2559] cPEG3aCO-Pen(3)—N(N(Me)2)-T-7MeW—K(NMeAc)-Pen(3)-mPEG3 TMA4F-2Nal-THP-K(NMeAc)—N-3Pya-Sar-CON(Me)2;
[2560] cPEG3aCO-Pen(3)—N(N(Me)2)-T-7MeW—K(NMeAc)-Pen(3)-morfTMA4F-2Nal-THP-K(NMeAc)—N-3Pya-Sar-CON(Me)2;
[2561] cPEG3aCO-Pen(3)—N(N(Me)2)-T-7MeW—K(NMeAc)-Pen(3)-DMTASF-2Nal-THP-K(NMeAc)—N-3Pya-Sar-CON(Me)2;
[2562] MeCO-Pen(3)—N(N(Me)2)-T-7MeW-APEG2Ser(R*)-Pen(3)-APEG3F-2Nal-THP-K(NMeAc)—N-3Pya-Sar-CON(Me)2;
[2563] MeCO-Pen(3)—N(N(Me)2)-T-7MeW-APEG2Ser(S*)-Pen(3)-APEG3F-2Nal-THP-K(NMeAc)—N-3Pya-Sar-CON(Me)2;
[2564] cPEG3aCO-Pen(3)—N(N(Me)2)-T-7MeW—K(NMeAc)-Pen(3)-AEF(BisPEG2a)(S*)-2Nal-THP-K(NMeAc)—N-3Pya-Sar-CON(Me)2;
[2565] cPEG3aCO-Pen(3)—N(N(Me)2)-T-7MeW—K(NMeAc)-Pen(3)-AEF(BisPEG2a)(RS)-2Nal-THP-K(NMeAc)—N-3Pya-Sar-CON(Me)2;
[2566] cPEG3aCO-Pen(3)—N(N(Me)2)-T-7MeW—K(NMeAc)-Pen(3)-AEF(aPEG2a)-2Nal-THP-K(NMeAc)—N-3Pya-Sar-CON(Me)2;
[2567] cPEG3aCO-Pen(3)—N(N(Me)2)-T-7MeW—K(NMeAc)-Pen(3)-TBAPEG3F-2Nal-THP-K(NMeAc)—N-3Pya-Sar-CON(Me)2;
[2568] cPEG3aCO-Pen(3)—N(N(Me)2)-T-7MeW—K(NMeAc)-Pen(3)-MTASF-2Nal-THP-K(NMeAc)—N-3Pya-Sar-CON(Me)2;
[2569] cPEG3aCO-Pen(3)—N(N(Me)2)-T-7MeW—K(NMeAc)-Pen(3)-AEF(NMe3)-2Nal-THP-K(NMeAc)—N-3Pya-Sar-CON(Me)2;
[2570] cPEG3aCO-Pen(3)—N(N(Me)2)-T-7MeW—K(NMeAc)-Pen(3)—YC8CO(NHPEG3a)-2Nal-THP-K(NMeAc)—N-3Pya-Sar-CON(Me)2;
[2571] cPEG3aCO-Pen(3)—N(N(Me)2)-T-7MeW-APEG2Ser(S*)-Pen(3)-TMAPF-2Nal-THP-K(NMeAc)—N-3Pya-Sar-CON(Me)2;
[2572] cPEG3aCO-Pen(3)—N(N(Me)2)-T-7MeW-APEG2Ser(R*)-Pen(3)-TMAPF-2Nal-THP-K(NMeAc)—N-3Pya-Sar-CON(Me)2;
[2573] cPEG3aCO-Pen(3)—N(N(Me)2)-T-7MeW-APEG2Ser-Pen(3)-AEF-2Nal-THP-K(NMeAc)—N-3Pya-Sar-CON(Me)2;
[2574] cPEG3aCO-Pen(3)—N(N(Me)2)-T-7MeW-APEG2Ser(R*)-Pen(3)-AEF-2Nal-THP-K(NMeAc)—N-3Pya-Sar-CON(Me)2;
[2575] cPEG3aCO-Pen(3)—N(N(Me)2)-T-7MeW—K(Ac)-Pen(3)-APEG3F-2Nal-THP-K(NMeAc)—N-3Pya-Sar-CON(Me)2;
[2576] cPEG3aCO-Pen(3)—N(N(Me)2)-T-7MeW—K(NMeAc)-Pen(3)-YC8COPip-2Nal-THP-K(NMeAc)—N-3Pya-Sar-CON(Me)2;
[2577] cPEG3aCO-Pen(3)—N(N(Me)2)-T-7MeW—K(NMeAc)-Pen(3)-AEF(NMeBismPEG3)-2Nal-THP-K(NMeAc)—N-3Pya-Sar-CON(Me)2;
[2578] cPEG3aCO-Pen(3)—N(N(Me)2)-T-7MeW—K(NMeAc)-Pen(3)-AEF(NMe2mPEG3)-2Nal-THP-K(NMeAc)—N-3Pya-Sar-CON(Me)2;
[2579] cPEG3aCO-Pen(3)—N(N(Me)2)-T-7MeW—K(NMeAc)-Pen(3)-AEF(PEG2a)-2Nal-THP-K(NMeAc)—N-3Pya-Sar-CON(Me)2;
[2580] cPEG3aCO-Pen(3)—N(N(Me)2)-T-7MeW—K(NMeAc)-Pen(3)-AEF(NMePEG2a)-2Nal-THP-K(NMeAc)—N-3Pya-Sar-CON(Me)2;
[2581] cPEG3aCO-Pen(3)—N(N(Me)2)-T-7MeW—K(NMeAc)-Pen(3)—Y(C9OH)-2Nal-THP-K(NMeAc)—N-3Pya-Sar-CON(Me)2;
[2582] cPEG3aCO-Pen(3)—N(N(Me)2)-T-7MeW—K(NMeAc)-Pen(3)-AEF(MePrpa)-2Nal-THP-K(NMeAc)—N-3Pya-Sar-CON(Me)2;
[2583] MeCO-APEG2ser-Pen(3)—N(N(Me)2)-T-7MeW—K(NMeAc)-Pen(3)-APEG3F-2Nal-THP-K(NMeAc)—N-3Pya-Sar-CON(Me)2;
[2584] cPEG3aCO-Pen(3)—N(N(Me)2)-T-7MeW—K(NMeAc)-Pen(3)-NPyEF-2Nal-THP-K(NMeAc)—N-3Pya-Sar-CON(Me)2;
[2585] cPEG3aCO-Pen(3)—N(N(Me)2)-T-7MeW—K(NMeAc)-Pen(3)-TMA3F-2Nal-THP-K(NMeAc)—N-3Pya-Sar-CON(Me)2;
[2586] cPEG3aCO-Pen(3)—N(N(Me)2)-T-7MeW—K(NMeAc)-Pen(3)-TMA3F-2Nal-THP-K(NMeAc)—N-3Pya-Sar-CON(Me)2;
[2587] cPEG3aCO-Pen(3)—N(N(Me)2)-T-7MeW—K(NMeAc)-Pen(3)-mPEG2TMA2F-2Nal-THP-K(NMeAc)—N-3Pya-Sar-CON(Me)2;
[2588] cPEG3aCO-Pen(3)—N(N(Me)2)-T-7MeW—K(NMeAc)-Pen(3)-mPEG2TMA4F-2Nal-THP-K(NMeAc)—N-3Pya-Sar-CON(Me)2;
[2589] cPEG3aCO-Pen(3)—N(N(Me)2)-T-7MeW—K(NMeAc)-Pen(3)-TMA4F-2Nal-THP-K(NMeAc)—N-3Pya-Sar-CON(Me)2;
[2590] mPEG3CO-SP6-Pen(3)—N(N(Me)2)-T-7MeW—K(NMeAc)-Pen(3)-APEG3F-2Nal-THP-K(NMeAc)—N-3Pya-Sar-CON(Me)2;
[2591] cPEG3aCO-Pen(3)—N(N(Me)2)-T-7MeW—K(NMeAc)-Pen(3)-MPzPEG3F-2Nal-THP-K(NMeAc)—N-3Pya-Sar-CON(Me)2;
[2592] cPEG3aCO-Pen(3)—N(N(Me)2)-T-7MeW—K(NMeAc)-Pen(3)-MMPEG3F-2Nal-THP-K(NMeAc)—N-3Pya-Sar-CON(Me)2;
[2593] cPEG3aCO-Pen(3)—N(N(Me)2)-T-7MeW—K(NMeAc)-Pen(3)-ACHMF-2Nal-THP-K(NMeAc)—N-3Pya-Sar-CON(Me)2;
[2594] MeCO-Pen(3)—N(N(Me)2)-T-7MeW—K(NMePEG3a)-Pen(3)-APEG3F-2Nal-THP-K(NMeAc)—N-3Pya-Sar-CON(Me)2;
[2595] MeCO-k(Me)₃-Pen(3)—N(N(Me)2)-T-7MeW—K(NMeAc)-Pen(3)-APEG3F-2Nal-THP-K(NMeAc)—N-3Pya-Sar-CON(Me)2;
[2596] cPEG3aCO-Pen(3)—N(N(Me)2)-T-7MeW—K(NMeAc)-Pen(3)-DMMMF-2Nal-THP-K(NMeAc)—N-3Pya-Sar-CON(Me)2;
[2597] MeCO-Pen(3)—N(N(Me)2)-T-7MeW-Dab(NMecarn)-Pen(3)-APEG3F-2Nal-THP-K(NMeAc)—N-3Pya-Sar-CON(Me)2;
[2598] cPEG3aCO-Pen(3)—N(N(Me)2)-T-7MeW—K(NMeAc)-Pen(3)-ACHMF-2Nal-THP-K(NMeAc)—N-3Pya-Sar-CON(Me)2;
[2599] cPEG3aCO-Pen(3)—N(N(Me)2)-T-7MeW—K(NMeAc)-Pen(3)-AEF((Ch)cPEG3a)-2Nal-THP-K(NMeAc)—N-3Pya-Sar-CON(Me)2;
[2600] cPEG3aCO-Pen(3)—N(N(Me)2)-T-7MeW—K(NMeAc)-Pen(3)-AEF(AcCh)-2Nal-THP-K(NMeAc)—N-3Pya-Sar-CON(Me)2;
[2601] cPEG3aCO-Pen(3)—N(N(Me)2)-T-7MeW—K(NMeAc)-Pen(3)-AEF(NsCh)-2Nal-THP-K(NMeAc)—N-3Pya-Sar-CON(Me)2;
[2602] cPEG3aCO-Pen(3)—N(N(Me)2)-T-7MeW—K(NMeAc)-Pen(3)-AEF(BisMEP))-2Nal-THP-K(NMeAc)—N-3Pya-Sar-CON(Me)2;
[2603] cPEG3aCO-Pen(3)—N(N(Me)2)-T-7MeW—K(NMeAc)-Pen(3)-DMPMF-2Nal-THP-K(NMeAc)—N-3Pya-Sar-CON(Me)2;
[2604] cPEG3aCO-Pen(3)—N(N(Me)2)-T-7MeW—K(NMeAc)-Pen(3)-APEG2F-2Nal-THP-K(NMeAc)—N-3Pya-Sar-CON(Me)2;
[2605] cPEG3aCO-Pen(3)—N(N(Me)2)-T-7MeW—K(NMeAc)-Pen(3)-MMoEF-2Nal-THP-K(NMeAc)—N-3Pya-Sar-CON(Me)2;
[2606] cPEG3aCO-Pen(3)—N(N(Me)2)-T-7MeW—K(NMeAc)-Pen(3)-4DMPzEF-2Nal-THP-K(NMeAc)—N-3Pya-Sar-CON(Me)2;
[2607] MeCO-Pen(3)—N(N(Me)2)-T-7MeW—K(NMeAc)-Pen(3)-TMAPF-2Nal-THP-K(NMeAc)—N-3Pya-Sar-CON(Me)2;
[2608] cPEG3aCO-Pen(3)—N(N(Me)2)-T-7MeW—K(NMeAc)-Pen(3)-4DMPEF-2Nal-THP-K(NMeAc)—N-3Pya-Sar-CON(Me)2;
[2609] MeCO-Pen(3)—N(N(Me)2)-T-7MeW—K(NMeAc)-Pen(3)-APEG3F-2Nal-TTHP-K(NMeAc)—N-3Pya-Sar-CON(Me)2;
[2610] cPEG3aCO-Pen(3)—N(N(Me)2)-T-7MeW—K(NMeAc)-Pen(3)-APEG3F-2Nal-THP-K(NMeAc)—N-3Pya-Sar-CON(Me)2;
[2611] cPEG3aCO-Pen(3)—N(N(Me)2)-T-7MeW—K(NMeAc)-Pen(3)-TMAPF-2Nal-THP-K(NMeAc)—N-3Pya-Sar-CON(Me)2;
[2612] MeCO-Pen(3)—N(N(Me)2)-T-7MeW—K(NMeAc)-Pen(3)-AEF(N(Me)2)-2Nal-THP-K(NMeAc)—N-3Pya-Sar-CON(Me)2;
[2613] CF3CO-Pen(3)—N(N(Me)2)-T-7CF3W—K(NMeAc)-Pen(3)-AEF(N(Me)2)-2Nal-THP-K(NMeAc)—N-3Pya-Sar-CON(Me)2;
[2614] CF3CO-Pen(3)—N(N(Me)2)-T-7CF3W—K(NMeAc)-Pen(3)-AEF-2Nal-THP-K(NMeAc)—N-3Pya-Sar-CON(Me)2;
[2615] CF3CO-Pen(3)—N(N(Me)2)-T-7MeW—K(NMeAc)-Pen(3)-AEF-2Nal-THP-K(NMeAc)—N-3Pya-Sar-CON(Me)2;
[2616] CF3CO-Pen(3)—N(N(Me)2)-T-7MeW—K(NMeAc)-Pen(3)-AEF(N(Me)2)-2Nal-THP-K(NMeAc)—N-3Pya-Sar-CON(Me)2;
[2617] MeCO-Pen(3)—N(N(Me)2)-T-7MeW—K(NMeAc)-Pen(3)-APEG3F-2Nal-TTHP-K(NMePEG3a)—N-3Pya-Sar-CON(Me)2;
[2618] cPEG3aCO-Pen(3)—N(N(Me)2)-T-7MeW—K(NMeAc)-Pen(3)-TMAPF-2Nal-THP-K(PEG2PEG2gEC12)—N-3Pya-Sar-CON(Me)2;
[2619] cPEG3aCO-Pen(3)—N(N(Me)2)-T-7MeW—K(PEG2PEG2gEC12)-Pen(3)-TMAPF-2Nal-THP-K(PEG2PEG2gEC12)—N-3Pya-Sar-CON(Me)2;
[2620] cPEG3aCO-k(PEG2PEG2gEC12)-Pen(3)—N(N(Me)2)-T-7MeW—K(NMeAc)-Pen(3)-TMAPF-2Nal-THP-K(PEG2PEG2gEC12)—N-3Pya-Sar-CON(Me)2;
[2621] C12gEPEG2PEG2CO-hk(Me)₃-Pen(3)—N(N(Me)2)-T-7MeW—K(NMeAc)-Pen(3)-TMAPF-2Nal-THP-K(PEG2PEG2gEC12)—N-3Pya-Sar-CON(Me)2;
[2622] C12gEPEG2PEG2CO-hk(Me)₃-Pen(3)—N(N(Me)2)-T-7MeW—K(NMeAc)-Pen(3)-TMAPF-2Nal-K(PEG2PEG2gEC12)—N-3Pya-Sar-CON(Me)2;
[2623] cPEG3aCO-Pen(3)—N(N(Me)2)-T-7MeW—K(PEG2PEG2gEC14)-Pen(3)-TMAPF-2Nal-THP-K(PEG2PEG2gEC14)—N-3Pya-Sar-CON(Me)2;
[2624] cPEG3aCO-Pen(3)—N(N(Me)2)-T-7MeW—K(NMeAc)-Pen(3)-TMAPF-2Nal-THP-K(PEG2PEG2gEC14)—N-3Pya-Sar-CON(Me)2;
[2625] cPEG3aCO-k(PEG2PEG2gEC14)-Pen(3)—N(N(Me)2)-T-7MeW—K(NMeAc)-Pen(3)-TMAPF-2Nal-THP-K(PEG2PEG2gEC14)—N-3Pya-Sar-CON(Me)2;
[2626] C14gEPEG2PEG2CO-hk(Me)₃-Pen(3)—N(N(Me)2)-T-7MeW—K(NMeAc)-Pen(3)-TMAPF-2Nal-THP-K(PEG2PEG2gEC14)—N-3Pya-Sar-CON(Me)2;
[2627] cPEG3aCO-Pen(3)—N(N(Me)2)-T-7MeW—K(NMeAc)-Pen(3)-APEG3F-2Nal-THP-L-N-3Pya-Sar-CON(Me)2;
[2628] 5cpaCO-Pen(3)—N(N(Me)2)-T-7MeW-Q(N(Me)2)-Pen(3)-AEF(N(Me)2)-2Nal-Pip(NMe2)-Q(N(Me)2)—N-3Pya-Sar-CON(Me)2;
[2629] cPEG3aCO-Pen(3)—N(N(Me)2)-T-7MeW—K(NMeAC)-Pen(3)-TMAPF-2Nal-THP-Q(N(Me)2)—N-3Pya-Sar-CON(Me)2;
[2630] cPEG3aCO-Pen(3)—N(N(Me)2)-T-7MeW-Q(N(Me)2)-Pen(3)-AEF(N(Me)2)-2Nal-THP-Q(N(Me)2)—N-3Pya-Sar-CON(Me)2;
[2631] cPEG3aCO-Pen(3)—N(N(Me)2)-T-7MeW-Q(N(Me)2)-Pen(3)-AEF-2Nal-THP-Q(N(Me)2)—N-3Pya-Sar-CON(Me)2;
[2632] MeCO-Pen(3)—N(N(Me)2)-T-7MeW-Q(N(Me)2)-Pen(3)-AEF(N(Me)2)-2Nal-THP-Q(N(Me)2)—N-3Pya-Sar-CON(Me)2;
[2633] 5cpaCO-Pen(3)—N(N(Me)2)-T-7MeW-Q(N(Me)2)-Pen(3)-TMAPF-2Nal-THP-Q(N(Me)2)—N-3Pya-Sar-CON(Me)2;
[2634] CF3CO-k(5cpa)-Pen(3)—N(N(Me)2)-T-7MeW-Q(N(Me)2)-Pen(3)-AEF(N(Me)2)-2Nal-THP-Q(N(Me)2)—N-3Pya-Sar-CON(Me)2;
[2635] 5cpaCO-Pen(3)—N(N(Me)2)-T-7MeW-Q(N(Me)2)-Pen(3)-AEF(N(Me)2)-2Nal-THP-Q(N(Me)2)—N-3Pya-Sar-CON(Me)2;
[2636] cPEG3aCO-Pen(3)—N(N(Me)2)-T-7MeW—K(NMeAc)-Pen(3)-APEG3F-2Nal-THP—W—N-3Pya-Sar-CON(Me)2;
[2637] cPEG3aCO-Pen(3)—N(N(Me)2)-T-7MeW—K(NMeAc)-Pen(3)-AEF(BisMEPa)-2Nal-THP-K(NMeAc)—N-3Pya-Sar-CON(Me)2;
[2638] cPEG3aCO-Pen(3)—N(N(Me)2)-T-7MeW-Dab(NMeAc)-Pen(3)-AEF-2Nal-THP-Dab(NMeAc)—N-3Pya-Sar-CONH(PEG3a);
[2639] cPEG3aCO-Pen(3)—N(N(Me)2)-T-7MeW—K(NMeAC)-Pen(3)-TMAPF-2Nal-THP-K(NMeAC)—N-3Pya-NMeK(PEG2PEG2C12)—CONH2;
[2640] cPEG3aCO-Pen(3)—N(N(Me)2)-T-7MeW—K(Ac)-Pen(3)-TMAPF-2Nal-THP-K(NMeAc)—N-3Pya-NMeK(PEG2PEG2C14)—CONH2;
[2641] C12gEPEG2PEG2CO-Pen(3)—N(N(Me)2)-T-7MeW—K(Ac)-Pen(3)-TMAPF-2Nal-THP-K(NMeAc)—N-3Pya-NMeK(PEG2PEG2gEC12)—CONH2;
[2642] cPEG3aCO-Pen(3)—N(N(Me)2)-T-7MeW—K(PEG2PEG2gEC12)-Pen(3)-TMAPF-2Nal-THP-K(NMeAc)—N-3Pya-NMeK(PEG2PEG2gEC12)—CONH2;
[2643] cPEG3aCO-k(PEG2PEG2gEC12)-Pen(3)—N(N(Me)2)-T-7MeW—K(Ac)-Pen(3)-TMAPF-2Nal-THP-K(NMeAc)—N-3Pya-NMeK(PEG2PEG2gEC12)—CONH2;
[2644] cPEG3aCO-Pen(3)—N(N(Me)2)-T-7MeW—K(NMeAC)-Pen(3)-TMAPF-2Nal-THP-K(NMeAC)—N-3Pya-NMeK(PEG2PEG2gEC12)—CONH2;
[2645] cPEG3aCO-Pen(3)—N(N(Me)2)-T-7MeW—K(Ac)-Pen(3)-TMAPF-2Nal-THP-K(NMeAC)—N-3Pya-NMeK(PEG2PEG2gEC12)—CONH2;
[2646] cPEG3aCO-Pen(3)—N(N(Me)2)-T-7MeW—K(Ac)-Pen(3)-TMAPF-2Nal-THP-K(PEG2PEG2gEC12)—N-3Pya-NMeK(PEG2PEG2gEC12)—CONH2;
[2647] cPEG3aCO-Pen(3)—N(N(Me)2)-T-7MeW—K(PEG2PEG2gEC14)-Pen(3)-TMAPF-2Nal-THP-K(NMeAc)—N-3Pya-NMeK(PEG2PEG2gEC14)—CONH2;
[2648] C14gEPEG2PEG2CO-Pen(3)—N(N(Me)2)-T-7MeW—K(Ac)-Pen(3)-TMAPF-2Nal-THP-K(NMeAc)—N-3Pya-NMeK(PEG2PEG2gEC14)—CONH2;
[2649] cPEG3aCO-k(PEG2PEG2gEC14)-Pen(3)—N(N(Me)2)-T-7MeW—K(Ac)-Pen(3)-TMAPF-2Nal-THP-K(NMeAc)—N-3Pya-NMeK(PEG2PEG2gEC14)—CONH2;
[2650] cPEG3aCO-Pen(3)—N(N(Me)2)-T-7MeW—K(NMeAC)-Pen(3)-TMAPF-2Nal-THP-K(NMeAC)—N-3Pya-NMeK(PEG2PEG2gEC14)—CONH2;
[2651] cPEG3aCO-Pen(3)—N(N(Me)2)-T-7MeW—K(Ac)-Pen(3)-TMAPF-2Nal-THP-K(PEG2PEG2gEC14)—N-3Pya-NMeK(PEG2PEG2gEC14)—CONH2;
[2652] cPEG3aCO-Pen(3)—N(N(Me)2)-T-7MeW—K(Ac)-Pen(3)-TMAPF-2Nal-THP-K(NMeAc)—N-3Pya-NMeK(PEG2PEG2K(PEG2PEG2gEC12)₂)—CONH2;
[2653] cPEG3aCO-Pen(3)—N(N(Me)2)-T-7MeW—K(Ac)-Pen(3)-TMAPF-2Nal-THP-K(NMeAc)—N-3Pya-NMeK(PEG2PEG2K(PEG2PEG2PEG2PEG2gEC12)₂)—CONH2;
[2654] cPEG3aCO-Pen(3)—N(N(Me)2)-T-7MeW—K(Ac)-Pen(3)-TMAPF-2Nal-THP-K(PEG2PEG2PEG2gEC12))—N-3Pya-NMeK(PEG2PEG2PEG2gEC12)—CONH2;
[2655] cPEG3aCO-k(PEG2PEG2PEG2PEG2gEC12)-Pen(3)—N(N(Me)2)-T-7MeW—K(Ac)-Pen(3)-TMAPF-2Nal-THP-K(NMeAc)—N-3Pya-NMeK(PEG2PEG2PEG2PEG2gEC12)—CONH2;
[2656] cPEG3aCO-k(PEG2PEG6gEC12)-Pen(3)—N(N(Me)2)-T-7MeW—K(Ac)-Pen(3)-TMAPF-2Nal-THP-K(NMeAc)—N-3Pya-NMeK(PEG2PEG6gEC12)—CONH2;
[2657] cPEG3aCO-Pen(3)—N(N(Me)2)-T-7MeW—K(Ac)-Pen(3)-TMAPF-2Nal-THP-K(NMeAc)—N-3Pya-NMeK(PEG2PEG6gEC12)—CONH2;
[2658] cPEG3aCO-Pen(3)—N(N(Me)2)-T-7MeW—K(Ac)-Pen(3)-TMAPF-2Nal-THP-K(NMeAc)—N-3Pya-NMeK(PEG2PEG6gEC14)—CONH2;
[2659] cPEG3aCO-Pen(3)—N(N(Me)2)-T-7MeW—K(Ac)-Pen(3)-TMAPF-2Nal-THP-K(NMeAc)—N-3Pya-NMeK(SP6PEG2PEG2C12)—CONH2;
[2660] cPEG3aCO-Pen(3)—N(N(Me)2)-T-7MeW—K(Ac)-Pen(3)-TMAPF-2Nal-THP-K(NMeAc)—N-3Pya-NMeK(SP6PEG2PEG2gEC12)—CONH2;
[2661] MeCO-Pen(3)—N(N(Me)2)-T-7MeW—K(Ac)-Pen(3)-AEF-2Nal-THP—K(Ac)—N-3Pya-Sar-CONH2;
[2662] cPEG3aCO-Pen(3)—N(N(Me)2)-T-7MeW—K(NMeAc)-Pen(3)-AEF-2Nal-THP—K(Ac)—N-3Pya-Sar-CONH2;
[2663] mPEG3CO-SP6-Pen(3)—N(N(Me)2)-T-7MeW—K(NMeAc)-Pen(3)-AEF-2Nal-THP—K(Ac)—N-3Pya-Sar-CONH2;
[2664] CF3CO-Pen(3)—N(N(Me)2)-T-7MeW—K(Ac)-Pen(3)-AEF-2Nal-THP—K(Ac)—N-3Pya-Sar-CONH2;
[2665] cPEG3aCO-Pen(3)—N(N(Me)2)-T-7MeW—K(NMeAc)-Pen(3)-APEG3F-2Nal-THP-K(NMeAc)—N-3Pya-Sar-CONH2;
[2666] cPEG3aCO-Pen(3)—N(N(Me)2)-T-7MeW-Dab(NMeAc)-Pen(3)-TMAPF-2Nal-THP-K(NMeAc)—N-3Pya-Sar-CONH2;
[2667] cPEG3aCO-Pen(3)—N(N(Me)2)-T-7MeW—K(NMeAc)-Pen(3)-TMAPF-2Nal-THP-K(NMeAc)—N-3Pya-Sar-CONH2;
[2668] MeCO-Pen(3)—N(N(Me)2)-T-7MeW—K(NMeAc)-Pen(3)-AEF-2Nal-THP-K(NMeAc)—N-3Pya-Sar-CONH2;
[2669] cPEG3aCO-Pen(3)—N(N(Me)2)-T-7MeW-Dab(NMeAc)-Pen(3)-AEF-2Nal-THP-K(NMeAc)—N-3Pya-Sar-CONH2;
[2670] cPEG3aCO-Pen(3)—N(N(Me)2)-T-7MeW—K(NMeAc)-Pen(3)-AEF-2Nal-THP-K(NMeAc)—N-3Pya-Sar-CONH2;
[2671] cPEG3aCO-Pen(3)—N(N(Me)2)-T-7MeW—K(NMeAc)-Pen(3)-AEF-2Nal-THP-Q(N(Me)2)—N-3Pya-Sar-CONH2;
[2672] cPEG3aCO-Pen(3)—N(N(Me)2)-T-7MeW-Q(N(Me)2)-Pen(3)-AEF-2Nal-THP-Q(N(Me)2)—N-3Pya-Sar-CONH2;
[2673] mPEG3CO-SP6-Pen(3)—N(N(Me)2)-T-7MeW-Q(N(Me)2)-Pen(3)-AEF-2Nal-THP-Q(N(Me)2)—N-3Pya-Sar-CONH2;
[2674] CF3CO-Pen(3)—N(N(Me)2)-T-7MeW—K(NMeAc)-Pen(3)-AEF(N(Me)2)-2Nal-THP-Q(N(Me)2)—N-3Pya-Sar-CONH2;
[2675] mPEG3CO-SP6-Pen(3)—N(N(Me)2)-T-7MeW—K(NMeAc)-Pen(3)-AEF-2Nal-THP-QNMe2-N-3Pya-Sar-CONH2;
[2676] cPEG3aCO-Pen(3)—N(NMe2)-T-7MeW—K(NMeAc)-Pen(3)-AEF(NHCh)-2Nal-THP-K(NMeAc)—N-3Pya-Sar-CON(Me)2;
   [2677] or a pharmaceutically acceptable salt thereof.

### Clause 10

[2678] 10. The compound of clause 3 wherein:

[2679] R⁹ is —NHCH₃, —N(CH₃)₂, —NH(CH₂CH₂O)₂CH₃, —N(CH₃)(CH₂CH₂O)₂CH₃, —NH(CH₂CH₂O)_{y}R^{s},

[chemical structure]

[2680] wherein:
   [2681] y is 2, 4, or 6;
   [2682] R^{s} is —CH₃, or

[chemical structure]

or
[2683] a pharmaceutically acceptable salt thereof.

### Clause 11

[2684] 11. A compound of Formula (IV):

[chemical structure]

[2685] wherein:
[2686] A is

[chemical structure]

[2687] wherein
   [2688] R⁵ is —OCHF₂, —O(CH₂)₉CO₂H,

[chemical structure]

[2689] wherein:
   [2690] R^{h} is H, —CH₃, —C(O)CH₃, —C(NH)NH₂, —(CH₂)₃O(CH₂)₂OCH₃, —CH₂CH₂OCH₃, —(CH₂CH₂O)₃CH₃, —(CH₂CH₂O)₆CH₃,

[chemical structure]

[2691] Rⁱ is H, —CH₃, —(CH₂)₃O(CH₂)₂OCH₃,

[chemical structure]

[2692] p is 1, 2 or 3;
[2693] R^{j} is

[chemical structure]

[2694] q is 1, 2, 3, 4, or 5;
[2695] R^{k} is —OCH₃,

[chemical structure]

[2696] r is 3, 4, 5, 6, or 8;
[2697] wherein:
   [2698] R^{jj} is H, —(CH₂)₇CH₃, —(CH₂)₁₅CH₃, —(CH₂)₂OCH₃, or —(CH₂CH₂O)₃CH₃;
[2699] X3 is a direct bond, (D) arginine, (D) lysine substituted with R^{b},

[chemical structure]

[2700] wherein:
   [2701] R^{b} is

[chemical structure]

[2702] R² is H, —CH(CH₃)₂,

[chemical structure]

[2703] wherein:
   [2704] R^{c} is H, or —CH₃;
   [2705] R^{c}′ is H, or —CH₃;
   [2706] R^{d} is

[chemical structure]

[2707] R³ is H, —CH₃, —CF₃, or

[chemical structure]

[2708] R⁴ is H, or —CH₃;
[2709] X8

[chemical structure]

[2710] wherein:
   [2711] R^{e} is H, or —CH₃;
   [2712] R^{ee} is H;
   [2713] R^{f} is H, —CH₃, —C(CH₃)₃, —C(O)CH₃, —C(O)(CH₂CH₂O)₆CH₃, —(CH₂CH₂O)₆CH₃,

[chemical structure]

[2714] R^{g} is H, —OH, —C(O)NH₂, or —CH₂NHC(O)CH₃;
[2715] n is 0, or 1;
[2716] X12 is absent,

[chemical structure]

[2717] R⁶ is —CH₃, —CH₂CH₂C(O)R^{m}, —(CH₂)ₛNRⁿR^{o},

[chemical structure]

[2718] R⁷ is H, or —CH₃;
[2719] wherein:
   [2720] R^{m} is —OH, or

[chemical structure]

[2721] Rⁿ is H, —CH₃, —CH₂CH(CH₃)₂, —C(O)CH₃, —C(O)(CH₂CH₂O)₆CH₃, —(CH₂CH₂O)₆CH₃, —C(O)(CH₂CH₂O)ₜCH₂CH₂R^{p},

[chemical structure]

[2722] R^{o} is H, —CH₃, or —C(O)CH₃;
[2723] wherein:
   [2724] R^{p} is NHC(O)CH₃, or

[chemical structure]

[2725] s is 1, 2, or 4;
[2726] t is 2, 6, 9, or 12;
[2727] u is 2 or 3;
[2728] v is 10 or 12;
[2729] R⁸ is —CH₂CH₂CH₂NHC(O)CH₃, —C(O)NH₂, or —C(O)NHCH₃;
[2730] X15 is absent,

[chemical structure]

[2731] X16 is absent,

[chemical structure]

[2732] wherein:
[2733] R^{q} is

[chemical structure]

[2734] R^{r} is H;
[2735] w is 2 4, or 5;
[2736] x is 2 or 4; and
[2737] R⁹ is —NH₂, —NHCH₃, —N(CH₃)₂, —NH(CH₂CH₂O)₂CH₃, —N(CH₃)(CH₂CH₂O)₂CH₃, —NH(CH₂CH₂O)_{y}R^{s},

[chemical structure]

[2738] wherein:
   [2739] y is 2, 4, or 6;
[2740] R^{s} is —CH₃, or

[chemical structure]

[2741] wherein:
   [2742] AN⁻as above defined for A, R, X3, X12, R1, R2, R5, R6, R8, R15, R16 and R^{a}, R^{b}, R^{d}, R^{f}, R^{h}, Rⁱ, R^{j}, R^{k}, R^{m}, Rⁿ, R^{o}, R^{s} is acetate, adipate, benzoate, benzenesulfonate, citrate, decanoate, chloride, lactate, maleate, methanesulfonate, oxalate, pivalate, propionate, succinate, sulfate, tartrate, or trifluoroacetate; or
[2743] a pharmaceutically acceptable salt thereof.

### Clause 12

[2744] 12. The compound of clause 10 wherein:
[2745] AN⁻is chloride;
[2746] or a pharmaceutically acceptable salt thereof.

### Clause 13

[2747] 13. The compound of clause 10 selected from
[2748] cPEG3aCO-Pen(3)—N(N(Me)2)-T-7MeW—K(NMeAc)-Pen(3)-4DMPEF-2Nal-THP-K(NMeAc)—N-3Pya-Sar-CON(Me)2;
[2749] cPEG3aCO-Pen(3)—N(N(Me)2)-T-7MeW—K(NMeAc)-Pen(3)-4DMPzEF-2Nal-THP-K(NMeAc)—N-3Pya-Sar-CON(Me)2;
[2750] cPEG3aCO-Pen(3)—N(N(Me)2)-T-7MeW—K(NMeAc)-Pen(3)-ACHMF-2Nal-THP-K(NMeAc)—N-3Pya-Sar-CON(Me)2;
[2751] cPEG3aCO-Pen(3)—N(N(Me)2)-T-7MeW—K(NMeAc)-Pen(3)-ACHMF-2Nal-THP-K(NMeAc)—N-3Pya-Sar-CON(Me)2;
[2752] cPEG3aCO-Pen(3)—N-T-7MeW—K(Ac)-Pen(3)-AEF-2Nal-THP-E-N-3Pya-Sar-CONH2;
[2753] cPEG3aCO-Pen(3)—N-T-7MeW—K(Ac)-Pen(3)-AEF-2Nal-THP—K(Ac)—N-3Pya-Sar-CONH2;
[2754] cPEG3aCO-Pen(3)—N-T-7MeW-Q(N(Me)2)-Pen(3)-AEF-2Nal-THP-Q(N(Me)2)—N-3Pya-Sar-CONH2;
[2755] cPEG3aCO-Pen(3)—N-T-7MeW-Q(N(Me)2)-Pen(3)-AEF-2Nal-THP-Q(N(Me)2)—N-3Pya-Sar-CON(Me)2;
[2756] cPEG3aCO-Pen(3)—N-T-7MeW—K(NMeAc)-Pen(3)-AEF-2Nal-THP-E-N-3Pya-Sar-CONH2;
[2757] cPEG3aCO-Pen(3)—N-T-7MeW—K(NMeAc)-Pen(3)-AEF-2Nal-THP—K(Ac)—N-3Pya-Sar-CONH2;
[2758] cPEG3aCO-Pen(3)—N-T-7MeW—K(NMeAc)-Pen(3)-AEF-2Nal-THP-K(NMeAc)—N-3Pya-Sar-CONH2;
[2759] cPEG3aCO-Pen(3)—N-T-7MeW-Q(N(Me)2)-Pen(3)-AEF-2Nal-THP-K(NMeAc)—N-3Pya-Sar-CONH2;
[2760] cPEG3aCO-Pen(3)—N-T-7MeW—K(NMeAc)-Pen(3)-AEF-2Nal-THP-Dab(NMeAc)—N-3Pya-Sar-CONH2;
[2761] cPEG3aCO-Pen(3)—N-T-7MeW-Q(N(Me)2)-Pen(3)-AEF-2Nal-THP-Dab(NMeAc)—N-3Pya-Sar-CONH2;
[2762] cPEG3aCO-Pen(3)—N-T-7(3NAcPh)W—K(Ac)-Pen(3)-AEF-2Nal-THP-E-N-3Pya-Sar-CONH2;
[2763] cPEG3aCO-Pen(3)—N-T-7(3NAcPh)W—K(Ac)-Pen(3)-AEF-2Nal-THP—K(Ac)—N-3Pya-Sar-CONH2;
[2764] cPEG3aCO-r-Pen(3)—N-T-7MeW—K(Ac)-Pen(3)-AEF-2Nal-THP-E-N-5MePyridinAla-Sar-CONH2;
[2765] cPEG3aCO-Pen(3)—N(N(Me)2)-T-7MeW-Q(N(Me)2)-Pen(3)-AEF-2Nal-THP-Q(N(Me)2)—N-3Pya-Sar-CON(Me)2;
[2766] cPEG3aCO-Pen(3)—N(N(Me)2)-T-7MeW-AIB-Pen(3)-AEF-2Nal-THP-AIB-N-3Pya-Sar-CON(Me)2;
[2767] cPEG3aCO-Pen(3)—N(N(Me)2)-T-7MeW-Q(N(Me)2)-Pen(3)-AEF-2Nal-THP-Q(N(Me)2)—N-3Pya-Sar-CONH2;
[2768] cPEG3aCO-Pen(3)—N(N(Me)2)-T-7MeW—K(NMeAc)-Pen(3)-AEF-2Nal-THP—K(Ac)—N-3Pya-Sar-CONH2;
[2769] cPEG3aCO-Pen(3)—N(N(Me)2)-T-7MeW—K(NMeAc)-Pen(3)-AEF-2Nal-THP-Q(N(Me)2)—N-3Pya-Sar-CONH2;
[2770] cPEG3aCO-Pen(3)—N(N(Me)2)-T-7MeW-Q(N(Me)2)-Pen(3)-AEF-2Nal-THP-Dab(NMeAc)—N-3Pya-Sar-CON(Me)2;
[2771] cPEG3aCO-Pen(3)—N(N(Me)2)-T-7MeW-Dab(NMeAc)-Pen(3)-AEF-2Nal-THP-Dab(NMeAc)—N-3Pya-Sar-CON(Me)2;
[2772] cPEG3aCO-Pen(3)—N(N(Me)2)-T-7MeW—K(NMeAc)-Pen(3)-AEF-2Nal-THP-K(NMeAc)—N-3Pya-Sar-CONH2;
[2773] cPEG3aCO-Pen(3)—N(N(Me)2)-T-7MeW-Dab(NMeAc)-Pen(3)-AEF-2Nal-THP-K(NMeAc)—N-3Pya-Sar-CONH2;
[2774] cPEG3aCO-Pen(3)—N(N(Me)2)-T-7MeW-Dab(NMeAc)-Pen(3)-AEF-2Nal-THP-E-N-3Pya-Sar-CONH2;
[2775] cPEG3aCO-Pen(3)—N(N(Me)2)-T-7MeW—K(NMeAc)-Pen(3)-AEF-2Nal-THP-Dab(NMeAc)—N-3Pya-Sar-CON(Me)2;
[2776] cPEG3aCO-Pen(3)—N(N(Me)2)-T-7MeW—K(NMeAc)-Pen(3)-AEF-2Nal-diFCpx-Dab(NMeAc)—N-3Pya-Sar-CON(Me)2;
[2777] cPEG3aCO-Pen(3)—N(N(Me)2)-T-7MeW—K(NMeAc)-Pen(3)-AEF-2Nal-diFCpx-Dab(NMeAc)—N-3Pya-Sar-CON(Me)2;
[2778] cPEG3aCO-Pen(3)—N(N(Me)2)-T-7MeW-Dab(NMeAc)-Pen(3)-AEF-2Nal-THP-Dab(NMeAc)—N-3Pya-Sar-CONH(PEG3a);
[2779] cPEG3aCO-Pen(3)—N(N(Me)2)-T-7MeW-Dab(NMecPEG3a)-Pen(3)-AEF-2Nal-THP-Dab(NMeAc)—N-3Pya-Sar-CON(Me)2;
[2780] cPEG3aCO-Pen(3)—N(N(Me)2)-T-7MeW-APEG2Ser-Pen(3)-AEF-2Nal-THP-K(NMeAc)—N-3Pya-Sar-CON(Me)2;
[2781] cPEG3aCO-Pen(3)—N(N(Me)2)-T-7MeW-APEG2Ser(R*)-Pen(3)-AEF-2Nal-THP-K(NMeAc)—N-3Pya-Sar-CON(Me)2;
[2782] cPEG3aCO-Pen(3)—N(N(Me)2)-T-7MeW—K(NMeAc)-Pen(3)-AEF-2Nal-THP-K(NMeAc)—N-3Pya-Sar-CON(Me)2;
[2783] cPEG3aCO-Pen(3)—N(N(Me)2)-T-7MeW—K(NMeAc)-Pen(3)-AEF((Ch)cPEG3a)-2Nal-THP-K(NMeAc)—N-3Pya-Sar-CON(Me)2;
[2784] cPEG3aCO-Pen(3)—N(N(Me)2)-T-7MeW—K(NMeAc)-Pen(3)-AEF(AcCh)-2Nal-THP-K(NMeAc)—N-3Pya-Sar-CON(Me)2;
[2785] cPEG3aCO-Pen(3)—N(N(Me)2)-T-7MeW—K(NMeAc)-Pen(3)-AEF(aPEG2a)-2Nal-THP-K(NMeAc)—N-3Pya-Sar-CON(Me)2;
[2786] cPEG3aCO-Pen(3)—N(N(Me)2)-T-7MeW—K(NMeAc)-Pen(3)-AEF(BisMEP))-2Nal-THP-K(NMeAc)—N-3Pya-Sar-CON(Me)2;
[2787] cPEG3aCO-Pen(3)—N(N(Me)2)-T-7MeW—K(NMeAc)-Pen(3)-AEF(BisMEPa)-2Nal-THP-K(NMeAc)—N-3Pya-Sar-CON(Me)2;
[2788] cPEG3aCO-Pen(3)—N(N(Me)2)-T-7MeW—K(NMeAc)-Pen(3)-AEF(BisPEG2a)(RS)-2Nal-THP-K(NMeAc)—N-3Pya-Sar-CON(Me)2;
[2789] cPEG3aCO-Pen(3)—N(N(Me)2)-T-7MeW—K(NMeAc)-Pen(3)-AEF(BisPEG2a)(S*)-2Nal-THP-K(NMeAc)—N-3Pya-Sar-CON(Me)2;
[2790] cPEG3aCO-Pen(3)—N-T-7MeW—K(Ac)-Pen(3)-AEF(G)-2Nal-THP—K(Ac)—N-3Pya-Sar-CONH2;
[2791] cPEG3aCO-Pen(3)—N(N(Me)2)-T-7MeW—K(NMeAc)-Pen(3)-AEF(MePrpa)-2Nal-THP-K(NMeAc)—N-3Pya-Sar-CON(Me)2;
[2792] cPEG3aCO-Pen(3)—N(N(Me)2)-T-7MeW-Q(N(Me)2)-Pen(3)-AEF(N(Me)2)-2Nal-THP-Q(N(Me)2)—N-3Pya-Sar-CON(Me)2;
[2793] cPEG3aCO-Pen(3)—N(N(Me)2)-T-7MeW—K(NMeAc)-Pen(3)-AEF(N(Me)2)-2Nal-THP-K(NMeAc)—N-3Pya-Sar-CON(Me)2;
[2794] cPEG3aCO-Pen(3)—N(NMe2)-T-7MeW—K(NMeAc)-Pen(3)-AEF(NHCh)-2Nal-THP-K(NMeAc)—N-3Pya-Sar-CON(Me)2;
[2795] cPEG3aCO-Pen(3)—N(N(Me)2)-T-7MeW—K(NMeAc)-Pen(3)-AEF(NMe2mPEG3)-2Nal-THP-K(NMeAc)—N-3Pya-Sar-CON(Me)2;
[2796] cPEG3aCO-Pen(3)—N(N(Me)2)-T-7MeW—K(NMeAc)-Pen(3)-AEF(NMe3)-2Nal-THP-K(NMeAc)—N-3Pya-Sar-CON(Me)2;
[2797] cPEG3aCO-Pen(3)—N(N(Me)2)-T-7MeW—K(NMeAc)-Pen(3)-AEF(NMeBismPEG3)-2Nal-THP-K(NMeAc)—N-3Pya-Sar-CON(Me)2;
[2798] cPEG3aCO-Pen(3)—N(N(Me)2)-T-7MeW—K(NMeAc)-Pen(3)-AEF(NMePEG2a)-2Nal-THP-K(NMeAc)—N-3Pya-Sar-CON(Me)2;
[2799] cPEG3aCO-Pen(3)—N(N(Me)2)-T-7MeW—K(NMeAc)-Pen(3)-AEF(NsCh)-2Nal-THP-K(NMeAc)—N-3Pya-Sar-CON(Me)2;
[2800] cPEG3aCO-Pen(3)—N(N(Me)2)-T-7MeW—K(NMeAc)-Pen(3)-AEF(PEG2a)-2Nal-THP-K(NMeAc)—N-3Pya-Sar-CON(Me)2;
[2801] cPEG3aCO-Pen(3)—N(N(Me)2)-T-7MeW—K(NMeAc)-Pen(3)-AEF(SPD)-2Nal-THP-K(NMeAc)—N-3Pya-Sar-CON(Me)2;
[2802] cPEG3aCO-Pen(3)—N(N(Me)2)-T-7MeW—K(NMeAc)-Pen(3)-APEG2F-2Nal-THP-K(NMeAc)—N-3Pya-Sar-CON(Me)2;
[2803] cPEG3aCO-Pen(3)-A-T-7MeW-A-Pen(3)-APEG3F-2Nal-A-K(NMeAc)—N-3Pya-Sar-CON(Me)2;
[2804] cPEG3aCO-Pen(3)-APEG2Ser(S*)-T-7MeW—K(NMeAc)-Pen(3)-APEG3F-2Nal-THP-K(NMeAc)—N-3Pya-Sar-CON(Me)2;
[2805] cPEG3aCO-Pen(3)-Dab(Me)₃-T-7MeW—K(NMeAc)-Pen(3)-APEG3F-2Nal-THP-K(NMeAc)—N-3Pya-Sar-CON(Me)2;
[2806] cPEG3aCO-Pen(3)—F-T-7MeW—F-Pen(3)-APEG3F-2Nal-F—K(NMeAc)—N-3Pya-Sar-CON(Me)2;
[2807] cPEG3aCO-Pen(3)-Gab-T-7MeW—K(NMeAc)-Pen(3)-APEG3F-2Nal-THP-K(NMeAc)—N-3Pya-Sar-CON(Me)2;
[2808] cPEG3aCO-Pen(3)-L-T-7MeW-L-Pen(3)-APEG3F-2Nal-L-K(NMeAc)—N-3Pya-Sar-CON(Me)2;
[2809] cPEG3aCO-Pen(3)—N-T-7MeW—K(Ac)-Pen(3)-APEG3F-2Nal-THP—K(Ac)—N-3Pya-Sar-CONH2;
[2810] cPEG3aCO-Pen(3)—N-T-7MeW—K(NMeAc)-Pen(3)-APEG3F-2Nal-THP-K(NMeAc)—N-3Pya-Sar-CONH2;
[2811] cPEG3aCO-Pen(3)—N-T-7MeW—K(NMeAc)-Pen(3)-APEG3F-2Nal-THP-K(NMeAc)—N-3Pya-Sar-CON(Me)2;
[2812] cPEG3aCO-Pen(3)—N(N(Me)2)-T-7MeW—K(NMeAc)-Pen(3)-APEG3F-2Nal-THP-K(NMeAc)—N-3Pya-Sar-CON(Me)2;
[2813] cPEG3aCO-Pen(3)—N(N(Me)2)-T-7MeW—K(NMeAc)-Pen(3)-APEG3F-2Nal-THP-E-N-3Pya-Sar-CON(Me)2;
[2814] cPEG3aCO-Pen(3)—N(N(Me)2)-T-7MeW—K(NMeAc)-Pen(3)-APEG3F-2Nal-THP-Dab(NMeAc)—N-3Pya-Sar-CON(Me)2;
[2815] cPEG3aCO-Pen(3)—N(N(Me)2)-T-7MeW—K(NMeAc)-Pen(3)-APEG3F-2Nal-THP-Dab(NMeAc)—N-3Pya-Sar-CON(Me)2;
[2816] cPEG3aCO-Pen(3)—N(N(Me)2)-T-7MeW—K(NMeAc)-Pen(3)-APEG3F-2Nal-THP—K(Ac)—N-3Pya-Sar-CON(Me)2;
[2817] cPEG3aCO-Pen(3)—N(N(Me)2)-T-7MeW—K(Ac)-Pen(3)-APEG3F-2Nal-THP-K(NMeAc)—N-3Pya-Sar-CON(Me)2;
[2818] cPEG3aCO-Pen(3)—N(N(Me)2)-T-7MeW—K(NMeAc)-Pen(3)-APEG3F-2Nal-THP-K(NMeAc)—N-3Pya-Sar-CONH2;
[2819] cPEG3aCO-Pen(3)—N(N(Me)2)-T-7MeW—K(NMeAc)-Pen(3)-APEG3F-2Nal-THP-Dap(NMeAc)—N-3Pya-Sar-CON(Me)2;
[2820] cPEG3aCO-Pen(3)—N(N(Me)2)-T-7MeW—K(NMeAc)-Pen(3)-APEG3F-2Nal-THP-A-N-3Pya-Sar-CON(Me)2;
[2821] cPEG3aCO-Pen(3)—N(N(Me)2)-T-7MeW—K(NMeAc)-Pen(3)-APEG3F-2Nal-THP-L-N-3Pya-Sar-CON(Me)2;
[2822] cPEG3aCO-Pen(3)—N(N(Me)2)-T-7MeW—K(NMeAc)-Pen(3)-APEG3F-2Nal-THP—F—N-3Pya-Sar-CON(Me)2;
[2823] cPEG3aCO-Pen(3)—N(N(Me)2)-T-7MeW—K(NMeAc)-Pen(3)-APEG3F-2Nal-THP—W—N-3Pya-Sar-CON(Me)2;
[2824] cPEG3aCO-Pen(3)—W-T-7MeW—W-Pen(3)-APEG3F-2Nal-W—K(NMeAc)—N-3Pya-Sar-CON(Me)2;
[2825] cPEG3aCO-Pen(3)—N(N(Me)2)-T-7MeW—K(NMeAc)-Pen(3)-dFPPEG3F-2Nal-THP-K(NMeAc)—N-3Pya-Sar-CON(Me)2;
[2826] cPEG3aCO-Pen(3)—N(N(Me)2)-T-7MeW—K(NMeAc)-Pen(3)-Diazabiclyclooctane6F-2Nal-THP-K(NMeAc)—N-3Pya-Sar-CON(Me)2;
[2827] cPEG3aCO-Pen(3)—N(N(Me)2)-T-7MeW—K(NMeAc)-Pen(3)-DMMMF-2Nal-THP-K(NMeAc)—N-3Pya-Sar-CON(Me)2;
[2828] cPEG3aCO-Pen(3)—N(N(Me)2)-T-7MeW—K(NMeAc)-Pen(3)-DMPMF-2Nal-THP-K(NMeAc)—N-3Pya-Sar-CON(Me)2;
[2829] cPEG3aCO-Pen(3)—N(N(Me)2)-T-7MeW—K(NMeAc)-Pen(3)-DMTASF-2Nal-THP-K(NMeAc)—N-3Pya-Sar-CON(Me)2;
[2830] cPEG3aCO-Pen(3)—N(N(Me)2)-T-7MeW—K(NMeAc)-Pen(3)—F(4G)-2Nal-THP-K(NMeAc)—N-3Pya-Sar-CON(Me)2;
[2831] cPEG3aCO-Pen(3)—N-T-7MeW—K(Ac)-Pen(3)—F(4N3)-2Nal-THP—K(Ac)—N-3Pya-Sar-CONH2;
[2832] cPEG3aCO-Pen(3)—N(N(Me)2)-T-7MeW—K(NMeAc)-Pen(3)—F(4N3)-2Nal-THP-K(NMeAc)—N-3Pya-Sar-CON(Me)2;
[2833] cPEG3aCO-Pen(3)—N(N(Me)2)-T-7MeW—K(NMeAc)-Pen(3)—F(4Tz1DMA4mPEG)-2Nal-THP-K(NMeAc)—N-3Pya-Sar-CON(Me)2;
[2834] cPEG3aCO-Pen(3)—N(N(Me)2)-T-7MeW—K(NMeAc)-Pen(3)—F(4Tz1MME)-2Nal-THP-K(NMeAc)—N-3Pya-Sar-CON(Me)2;
[2835] cPEG3aCO-Pen(3)—N-T-7MeW—K(Ac)-Pen(3)—F(4Tz1MMo3)-2Nal-THP—K(Ac)—N-3Pya-Sar-CONH2;
[2836] cPEG3aCO-Pen(3)—N(N(Me)2)-T-7MeW—K(NMeAc)-Pen(3)—F(4Tz1MMo4)-2Nal-THP-K(NMeAc)—N-3Pya-Sar-CON(Me)2;
[2837] cPEG3aCO-Pen(3)—N-T-7MeW—K(Ac)-Pen(3)—F(4Tz1TMA1)-2Nal-THP—K(Ac)—N-3Pya-Sar-CONH2;
[2838] cPEG3aCO-Pen(3)—N(N(Me)2)-T-7MeW—K(NMeAc)-Pen(3)—F(4Tz1TMA1)-2Nal-THP-K(NMeAc)—N-3Pya-Sar-CON(Me)2;
[2839] cPEG3aCO-Pen(3)—N(N(Me)2)-T-7MeW—K(NMeAc)-Pen(3)—F(4Tz1TMA2)-2Nal-THP-K(NMeAc)—N-3Pya-Sar-CON(Me)2;
[2840] cPEG3aCO-Pen(3)—N-T-7MeW—K(Ac)-Pen(3)—F(4Tz1TMA3)-2Nal-THP—K(Ac)—N-3Pya-Sar-CONH2;
[2841] cPEG3aCO-Pen(3)—N(N(Me)2)-T-7MeW—K(NMeAc)-Pen(3)—F(4Tz1TMA3)-2Nal-THP-K(NMeAc)—N-3Pya-Sar-CON(Me)2;
[2842] cPEG3aCO-Pen(3)—N-T-7MeW—K(Ac)-Pen(3)—F(4Tz1TMA4)-2Nal-THP—K(Ac)—N-3Pya-Sar-CONH2;
[2843] cPEG3aCO-Pen(3)—N(N(Me)2)-T-7MeW—K(NMeAc)-Pen(3)—F(4Tz1TMA4)-2Nal-THP-K(NMeAc)—N-3Pya-Sar-CON(Me)2;
[2844] cPEG3aCO-Pen(3)—N(N(Me)2)-T-7MeW—K(NMeAc)-Pen(3)—F(4Tz1TMA5)-2Nal-THP-K(NMeAc)—N-3Pya-Sar-CON(Me)2;
[2845] cPEG3aCO-Pen(3)—N(N(Me)2)-T-7MeW—K(NMeAc)-Pen(3)-GPEG3F-2Nal-THP-K(NMeAc)—N-3Pya-Sar-CON(Me)2;
[2846] cPEG3aCO-Pen(3)—N(N(Me)2)-T-7MeW—K(NMeAc)-Pen(3)-hFTMAPF-2Nal-THP-K(NMeAc)—N-3Pya-Sar-CON(Me)2;
[2847] cPEG3aCO-Pen(3)—N(N(Me)2)-T-7MeW—K(NMeAc)-Pen(3)-MMoEF-2Nal-THP-K(NMeAc)—N-3Pya-Sar-CON(Me)2;
[2848] cPEG3aCO-Pen(3)—N(N(Me)2)-T-7(3NAcPh)W—K(NMeAc)-Pen(3)-MMoEF-2Nal-THP-K(NMeAc)—N-3Pya-Sar-CON(Me)2;
[2849] cPEG3aCO-Pen(3)—N(N(Me)2)-T-7MeW—K(NMeAc)-Pen(3)-MMoPF-2Nal-THP-K(NMeAc)—N-3Pya-Sar-CON(Me)2;
[2850] cPEG3aCO-Pen(3)—N(N(Me)2)-T-7MeW—K(NMeAc)-Pen(3)-MMPEG3F-2Nal-THIP-K(NMeAc)—N-3Pya-Sar-CON(Me)2;
[2851] cPEG3aCO-Pen(3)—N(N(Me)2)-T-7MeW—K(NMeAc)-Pen(3)-morfTMA4F-2Nal-THIP-K(NMeAc)—N-3Pya-Sar-CON(Me)2;
[2852] cPEG3aCO-Pen(3)—N(N(Me)2)-T-7MeW—K(NMeAc)-Pen(3)-mPEG2TMA2F-2Nal-THIP-K(NMeAc)—N-3Pya-Sar-CON(Me)2;
[2853] cPEG3aCO-Pen(3)—N(N(Me)2)-T-7MeW—K(NMeAc)-Pen(3)-mPEG2TMA4F-2Nal-THIP-K(NMeAc)—N-3Pya-Sar-CON(Me)2;
[2854] cPEG3aCO-Pen(3)—N(N(Me)2)-T-7MeW—K(NMeAc)-Pen(3)-mPEG3 TMA4F-2Nal-THP-K(NMeAc)—N-3Pya-Sar-CON(Me)2;
[2855] cPEG3aCO-Pen(3)—N(N(Me)2)-T-7MeW—K(NMeAc)-Pen(3)-MPzPEG3F-2Nal-THIP-K(NMeAc)—N-3Pya-Sar-CON(Me)2;
[2856] cPEG3aCO-Pen(3)—N(N(Me)2)-T-7MeW—K(NMeAc)-Pen(3)-MTASF-2Nal-THP-K(NMeAc)—N-3Pya-Sar-CON(Me)2;
[2857] cPEG3aCO-Pen(3)—N(N(Me)2)-T-7MeW—K(NMeAc)-Pen(3)-NPyEF-2Nal-THIP-K(NMeAc)—N-3Pya-Sar-CON(Me)2;
[2858] cPEG3aCO-Pen(3)—N(N(Me)2)-T-7MeW—K(NMeAc)-Pen(3)-NPyPEG3F-2Nal-THIP-K(NMeAc)—N-3Pya-Sar-CON(Me)2;
[2859] cPEG3aCO-Pen(3)—N(N(Me)2)-T-7MeW—K(NMeAc)-Pen(3)-PiperazinequatF-2Nal-THP-K(NMeAc)—N-3Pya-Sar-CON(Me)2;
[2860] cPEG3aCO-Pen(3)—N(N(Me)2)-T-7MeW—K(NMeAc)-Pen(3)-TBAPEG3F-2Nal-THP-K(NMeAc)—N-3Pya-Sar-CON(Me)2;
[2861] cPEG3aCO-Pen(3)—N(N(Me)2)-T-7MeW—K(NMeAc)-Pen(3)-TMA3F-2Nal-THP-K(NMeAc)—N-3Pya-Sar-CON(Me)2;
[2862] cPEG3aCO-Pen(3)—N(N(Me)2)-T-7MeW—K(NMeAc)-Pen(3)-TMA3F-2Nal-THP-K(NMeAc)—N-3Pya-Sar-CON(Me)2;
[2863] cPEG3aCO-Pen(3)—N(N(Me)2)-T-7MeW—K(NMeAc)-Pen(3)-TMA4F-2Nal-THP-K(NMeAc)—N-3Pya-Sar-CON(Me)2;
[2864] cPEG3aCO-Pen(3)—N(N(Me)2)-T-7MeW—K(NMeAc)-Pen(3)-TMA6F-2Nal-THP-K(NMeAc)—N-3Pya-Sar-CON(Me)2;
[2865] cPEG3aCO-Pen(3)—N(N(Me)2)-T-7MeW—K(NMeAc)-Pen(3)-TMA8F-2Nal-THP-K(NMeAc)—N-3Pya-Sar-CON(Me)2;
[2866] cPEG3aCO-Pen(3)—K(cPEG3a)-T-7MeW—K(NMeAc)-Pen(3)-TMAPF-2Nal-THP-K(NMeAc)—N-3Pya-Sar-CON(Me)2;
[2867] cPEG3aCO-Pen(3)—K(Me)₃-T-7MeW—K(NMeAc)-Pen(3)-TMAPF-2Nal-THP-K(NMeAc)—N-3Pya-Sar-CON(Me)2;
[2868] cPEG3aCO-Pen(3)—K(Me)₃-T-7MeW—K(NMeAc)-Pen(3)-TMAPF-2Nal-Achx-K(NMeAc)—N-3Pya-Sar-CON(Me)2;
[2869] cPEG3aCO-Pen(3)—K(PEG2PEG2gEC12)-T-7MeW—K(Ac)-Pen(3)-TMAPF-2Nal-THP-K(NMeAc)—N-3Pya-NMeK(PEG2PEG2gEC12)—CONH2;
[2870] cPEG3aCO-k(PEG2PEG2gEC12)-Pen(3)—K(PEG2PEG2gEC12)-T-7MeW—K(NMeAc)-Pen(3)-TMAPF-2Nal-THP-K(NMeAc)—N-3Pya-Sar-CON(Me)2;
[2871] cPEG3aCO-Pen(3)—K(PEG2PEG2gEC12)-T-7MeW—K(NMeAc)-Pen(3)-TMAPF-2Nal-THP-K(NMeAc)—N-3Pya-Sar-CON(Me)2;
[2872] cPEG3aCO-Pen(3)—K(PEG2PEG2gEC12)-T-7MeW—K(PEG2PEG2gEC12)-Pen(3)-TMAPF-2Nal-THP-K(NMeAc)—N-3Pya-Sar-CON(Me)2;
[2873] cPEG3aCO-Pen(3)—K(PEG2PEG2gEC12)-T-7MeW—K(NMeAc)-Pen(3)-TMAPF-2Nal-THP-K(PEG2PEG2gEC12)—N-3Pya-Sar-CON(Me)2;
[2874] cPEG3aCO-Pen(3)—K(PEG2PEG2gEC14)-T-7MeW—K(Ac)-Pen(3)-TMAPF-2Nal-THP-K(NMeAc)—N-3Pya-NMeK(PEG2PEG2gEC14)—CONH2;
[2875] cPEG3aCO-k(PEG2PEG2gEC14)-Pen(3)—K(PEG2PEG2gEC14)-T-7MeW—K(NMeAc)-Pen(3)-TMAPF-2Nal-THP-K(NMeAc)—N-3Pya-Sar-CON(Me)2;
[2876] cPEG3aCO-Pen(3)—K(PEG2PEG2gEC14)-T-7MeW—K(NMeAc)-Pen(3)-TMAPF-2Nal-THP-K(NMeAc)—N-3Pya-Sar-CON(Me)2;
[2877] cPEG3aCO-Pen(3)—K(PEG2PEG2gEC14)-T-7MeW—K(PEG2PEG2gEC14)-Pen(3)-TMAPF-2Nal-THP-K(NMeAc)—N-3Pya-Sar-CON(Me)2;
[2878] cPEG3aCO-Pen(3)—K(PEG2PEG2gEC14)-T-7MeW—K(NMeAc)-Pen(3)-TMAPF-2Nal-THP-K(PEG2PEG2gEC14)—N-3Pya-Sar-CON(Me)2;
[2879] cPEG3aCO-Pen(3)—N-T-7MeW—K(NMeAc)-Pen(3)-TMAPF-2Nal-THP-K(NMeAc)—N-3Pya-Sar-CONH2;
[2880] cPEG3aCO-Pen(3)—N-T-7MeW—K(NMeAc)-Pen(3)-TMAPF-2Nal-THP-K(NMeAc)—N-3Pya-Sar-CON(Me)2;
[2881] cPEG3aCO-Pen(3)—N-T-7MeW—K(NMeAC)-Pen(3)-TMAPF-2Nal-THP-Dab(NMeAc)—N-3Pya-Sar-CON(Me)2;
[2882] cPEG3aCO-Pen(3)—N-T-7MeW-Dab(NMeAc)-Pen(3)-TMAPF-2Nal-THP-K(NMeAC)—N-3Pya-Sar-CON(Me)2;
[2883] cPEG3aCO-Pen(3)—N-T-7MeW—K(Ac)-Pen(3)-TMAPF-2Nal-THP-A-N-3Pya-Sar-CON(Me)2;
[2884] cPEG3aCO-Pen(3)—N-T-7MeW—K(Ac)-Pen(3)-TMAPF-2Nal-THP-K(PEG2PEG2gEC12)—N-3Pya-NMeK(PEG2PEG2gEC12)—CONH2;
[2885] cPEG3aCO-Pen(3)—N-T-7MeW—K(Ac)-Pen(3)-TMAPF-2Nal-THP-K(NMeAc)—N-3Pya-NMeK(PEG2PEG2gEC12)—CONH2;
[2886] cPEG3aCO-Pen(3)—N-T-7MeW—K(Ac)-Pen(3)-TMAPF-2Nal-THP-E-N-3Pya-Sar-CONH2;
[2887] cPEG3aCO-Pen(3)—N-T-7MeW—K(Ac)-Pen(3)-TMAPF-2Nal-THP—K(Ac)—N-3Pya-Sar-CONH2;
[2888] cPEG3aCO-Pen(3)—N-T-7(3NAcPh)W—K(Ac)-Pen(3)-TMAPF-2Nal-THP-E-N-3Pya-Sar-CONH2;
[2889] cPEG3aCO-Pen(3)—N(N(Me))-T-7MeW—K(NMeAc)-Pen(3)-TMAPF-2Nal-THP-K(NMeAc)—N-3Pya-Sar-CON(Me)2;
[2890] cPEG3aCO-Pen(3)—N(N(Me)2)-T-7MeW—K(NMeAc)-Pen(3)-TMAPF-2Nal-THP-K(NMeAc)—N-3Pya-Sar-CON(Me)2;
[2891] cPEG3aCO-Pen(3)—N(N(Me)2)-T-7MeW—K(NMeAc)-Pen(3)-TMAPF-2Nal-THP-E-N-3Pya-Sar-CON(Me)2;
[2892] cPEG3aCO-Pen(3)—N(N(Me)2)-T-7MeW—K(NMeAc)-Pen(3)-TMAPF-2Nal-THP-K(NMeAc)—N-3Pya-Sar-CO(NHPEG3a);
[2893] cPEG3aCO-Pen(3)—N(N(Me)2)-T-7MeW-APEG2Ser(S*)-Pen(3)-TMAPF-2Nal-THP-K(NMeAc)—N-3Pya-Sar-CON(Me)2;
[2894] cPEG3aCO-Pen(3)—N(N(Me)2)-T-7MeW-APEG2Ser(R*)-Pen(3)-TMAPF-2Nal-THP-K(NMeAc)—N-3Pya-Sar-CON(Me)2;
[2895] cPEG3aCO-Pen(3)—N(N(Me)2)-T-7(3NAcPh)W—K(NMeAc)-Pen(3)-TMAPF-2Nal-THP-K(NMeAc)—N-3Pya-Sar-CON(Me)2;
[2896] cPEG3aCO-Pen(3)—N(N(Me)2)-T-7MeW—K(NMeAC)-Pen(3)-TMAPF-2Nal-THP-Dab(NMeAc)—N-3Pya-Sar-CON(Me)2;
[2897] cPEG3aCO-Pen(3)—N(N(Me)2)-T-7MeW—K(NMeAC)-Pen(3)-TMAPF-2Nal-THP-K(NMeAC)—N-3Pya-NMeK(PEG2PEG2C12)—CONH2;
[2898] cPEG3aCO-Pen(3)—N(N(Me)2)-T-7MeW—K(Ac)-Pen(3)-TMAPF-2Nal-THP-Dab(NMeAc)—N-3Pya-Sar-CON(Me)2;
[2899] cPEG3aCO-Pen(3)—N(N(Me)2)-T-7MeW—K(NMeAC)-Pen(3)-TMAPF-2Nal-THP-Q(N(Me)2)—N-3Pya-Sar-CON(Me)2;
[2900] cPEG3aCO-Pen(3)—N(N(Me)2)-T-7MeW-Q(N(Me)2)-Pen(3)-TMAPF-2Nal-THP-K(NMeAC)—N-3Pya-Sar-CON(Me)2;
[2901] cPEG3aCO-Pen(3)—N(N(Me)2)-T-7MeW—K(Ac)-Pen(3)-TMAPF-2Nal-THP-K(NMeAC)—N-3Pya-NMeK(PEG2PEG2gEC12)—CONH2;
[2902] cPEG3aCO-Pen(3)—N(N(Me)2)-T-7MeW—K(NMeAC)-Pen(3)-TMAPF-2Nal-THP-K(NMeAC)—N-3Pya-NMeK(PEG2PEG2gEC12)—CONH2;
[2903] cPEG3aCO-Pen(3)—N(N(Me)2)-T-7MeW—K(NMeAC)-Pen(3)-TMAPF-2Nal-THP-K(NMeAC)—N-3Pya-NMeK(PEG2PEG2gEC14)—CONH2;
[2904] cPEG3aCO-Pen(3)—N(N(Me)2)-T-7MeW—K(NMeAc)-Pen(3)-TMAPF-2Nal-THP-A-N-3Pya-Sar-CON(Me)2;
[2905] cPEG3aCO-Pen(3)—N(N(Me)2)-T-7MeW—K(NMeAc)-Pen(3)-TMAPF-2Nal-THP-K(NMeAc)—N-3Pya-Sar-CONH2;
[2906] cPEG3aCO-Pen(3)—N(N(Me)2)-T-7MeW—K(NMeAc)-Pen(3)-TMAPF-2Nal-THP-Cit-N-3Pya-Sar-CON(Me)2;
[2907] cPEG3aCO-Pen(3)—N(N(Me)2)-T-7MeW—K(Me)₃-Pen(3)-TMAPF-2Nal-THP-K(NMeAc)—N-3Pya-Sar-CON(Me)2;
[2908] cPEG3aCO-Pen(3)—N(N(Me)2)-T-7MeW—K(NMeAc)-Pen(3)-TMAPF-2Nal-Acpx-K(NMeAc)—N-3Pya-Sar-CON(Me)2;
[2909] cPEG3aCO-Pen(3)—N(N(Me)2)-T-7MeW—K(NMeAc)-Pen(3)-TMAPF-2Nal-Achx-K(NMeAc)—N-3Pya-Sar-CON(Me)2;
[2910] cPEG3aCO-Pen(3)—N(N(Me)2)-T-7MeW—K(NMeAc)-Pen(3)-TMAPF-2Nal-Chg-K(NMeAc)—N-3Pya-Sar-CON(Me)2;
[2911] cPEG3aCO-Pen(3)—N(N(Me)2)-T-7MeW—K(NMeAc)-Pen(3)-TMAPF-2Nal-Aib-K(NMeAc)—N-3Pya-Sar-CON(Me)2;
[2912] cPEG3aCO-Pen(3)—N(N(Me)2)-T-7MeW-Cit-Pen(3)-TMAPF-2Nal-THP-K(NMeAc)—N-3Pya-Sar-CON(Me)2;
[2913] cPEG3aCO-k(PEG2PEG2gEC14)-Pen(3)—N(N(Me)2)-T-7MeW—K(Ac)-Pen(3)-TMAPF-2Nal-THP-K(NMeAc)—N-3Pya-NMeK(PEG2PEG2gEC14)—CONH2;
[2914] cPEG3aCO-k(PEG2PEG2gEC12)-Pen(3)—N(N(Me)2)-T-7MeW—K(Ac)-Pen(3)-TMAPF-2Nal-THP-K(NMeAc)—N-3Pya-NMeK(PEG2PEG2gEC12)—CONH2;
[2915] cPEG3aCO-Pen(3)—N(N(Me)2)-T-7MeW—K(Ac)-Pen(3)-TMAPF-2Nal-THP-K(PEG2PEG2gEC14)—N-3Pya-NMeK(PEG2PEG2gEC14)—CONH2;
[2916] cPEG3aCO-Pen(3)—N(N(Me)2)-T-7MeW—K(PEG2PEG2gEC12)-Pen(3)-TMAPF-2Nal-THP-K(NMeAc)—N-3Pya-NMeK(PEG2PEG2gEC12)—CONH2;
[2917] cPEG3aCO-Pen(3)—N(N(Me)2)-T-7MeW—K(Ac)-Pen(3)-TMAPF-2Nal-THP-K(PEG2PEG2gEC12)—N-3Pya-NMeK(PEG2PEG2gEC12)—CONH2;
[2918] cPEG3aCO-Pen(3)—N(N(Me)2)-T-7MeW—K(PEG2PEG2gEC14)-Pen(3)-TMAPF-2Nal-THP-K(NMeAc)—N-3Pya-NMeK(PEG2PEG2gEC14)—CONH2;
[2919] cPEG3aCO-Pen(3)—N(N(Me)2)-T-7MeW-Dab(NMeAc)-Pen(3)-TMAPF-2Nal-THP-K(NMeAc)—N-3Pya-Sar-CON(Me)2;
[2920] cPEG3aCO-Pen(3)—N(N(Me)2)-T-7MeW—K(Ac)-Pen(3)-TMAPF-2Nal-THP-K(NMeAc)—N-3Pya-NMeK(PEG2PEG2C14)—CONH2;
[2921] cPEG3aCO-Pen(3)—N(N(Me)2)-T-7MeW—K(Ac)-Pen(3)-TMAPF-2Nal-THP-K(NMeAc)—N-3Pya-NMeK(PEG2PEG6gEC12)—CONH2;
[2922] cPEG3aCO-Pen(3)—N(N(Me)2)-T-7MeW—K(Ac)-Pen(3)-TMAPF-2Nal-THP-K(NMeAc)—N-3Pya-NMeK(PEG2PEG6gEC14)—CONH2;
[2923] cPEG3aCO-Pen(3)—N(N(Me)2)-T-7MeW-Dab(NMeAc)-Pen(3)-TMAPF-2Nal-THP-K(NMeAc)—N-3Pya-Sar-CONH2;
[2924] cPEG3aCO-k(PEG2PEG6gEC12)-Pen(3)—N(N(Me)2)-T-7MeW—K(Ac)-Pen(3)-TMAPF-2Nal-THP-K(NMeAc)—N-3Pya-NMeK(PEG2PEG6gEC12)—CONH2;
[2925] cPEG3aCO-Pen(3)—N(N(Me)2)-T-7MeW—K(Ac)-Pen(3)-TMAPF-2Nal-THP-K(NMeAc)—N-3Pya-NMeK(PEG2PEG2K(PEG2PEG2gEC12)₂)—CONH2;
[2926] cPEG3aCO-Pen(3)—N(N(Me)2)-T-7MeW—K(Ac)-Pen(3)-TMAPF-2Nal-THP-K(PEG2PEG2PEG2gEC12))—N-3Pya-NMeK(PEG2PEG2PEG2gEC12)—CONH2;
[2927] cPEG3aCO-k(PEG2PEG2gEC12)-Pen(3)—N(N(Me)2)-T-7MeW—K(NMeAc)-Pen(3)-TMAPF-2Nal-THP-K(NMeAc)—N-3Pya-Sar-CON(Me)2;
[2928] cPEG3aCO-k(PEG2PEG2gEC14)-Pen(3)—N(N(Me)2)-T-7MeW—K(NMeAc)-Pen(3)-TMAPF-2Nal-THP-K(NMeAc)—N-3Pya-Sar-CON(Me)2;
[2929] cPEG3aCO-k(PEG2PEG2gEC12)-Pen(3)—N(N(Me)2)-T-7MeW—K(PEG2PEG2gEC12)-Pen(3)-TMAPF-2Nal-THP-K(NMeAc)—N-3Pya-Sar-CON(Me)2;
[2930] cPEG3aCO-Pen(3)—N(N(Me)2)-T-7MeW—K(cPEG3a)-Pen(3)-TMAPF-2Nal-THP-K(NMeAc)—N-3Pya-Sar-CON(Me)2;
[2931] cPEG3aCO-Pen(3)—N(N(Me)2)-T-7MeW—K(4cpg)-Pen(3)-TMAPF-2Nal-THP-K(NMeAc)—N-3Pya-Sar-CON(Me)2;
[2932] cPEG3aCO-k(PEG2PEG2gEC12)-Pen(3)—N(N(Me)2)-T-7MeW—K(NMeAc)-Pen(3)-TMAPF-2Nal-THP-K(PEG2PEG2gEC12)—N-3Pya-Sar-CON(Me)2;
[2933] cPEG3aCO-k(PEG2PEG2gEC14)-Pen(3)—N(N(Me)2)-T-7MeW—K(NMeAc)-Pen(3)-TMAPF-2Nal-THP-K(PEG2PEG2gEC14)—N-3Pya-Sar-CON(Me)2;
[2934] cPEG3aCO-Pen(3)—N(N(Me)2)-T-7MeW—K(PEG2PEG2gEC14)-Pen(3)-TMAPF-2Nal-THP-K(NMeAc)—N-3Pya-Sar-CON(Me)2;
[2935] cPEG3aCO-Pen(3)—N(N(Me)2)-T-7MeW—K(PEG2PEG2gEC12)-Pen(3)-TMAPF-2Nal-THP-K(PEG2PEG2gEC12)—N-3Pya-Sar-CON(Me)2;
[2936] cPEG3aCO-Pen(3)—N(N(Me)2)-T-7MeW—K(NMeAc)-Pen(3)-TMAPF-2Nal-THP-K(PEG2PEG2gEC12)—N-3Pya-Sar-CON(Me)2;
[2937] cPEG3aCO-Pen(3)—N(N(Me)2)-T-7MeW—K(NMeAc)-Pen(3)-TMAPF-2Nal-THP-K(PEG2PEG2gEC14)—N-3Pya-Sar-CON(Me)2;
[2938] cPEG3aCO-k(PEG2PEG2PEG2PEG2gEC12)-Pen(3)—N(N(Me)2)-T-7MeW—K(Ac)-Pen(3)-TMAPF-2Nal-THP-K(NMeAc)—N-3Pya-NMeK(PEG2PEG2PEG2PEG2gEC12)—CONH2;
[2939] cPEG3aCO-Pen(3)—N(N(Me)2)-T-7MeW—K(Ac)-Pen(3)-TMAPF-2Nal-THP-K(NMeAc)—N-3Pya-NMeK(SP6PEG2PEG2C12)—CONH2;
[2940] cPEG3aCO-Pen(3)—N(N(Me)2)-T-7MeW—K(Ac)-Pen(3)-TMAPF-2Nal-THP-K(NMeAc)—N-3Pya-NMeK(SP6PEG2PEG2gEC12)—CONH2;
[2941] cPEG3aCO-Pen(3)—N(N(Me)2)-T-7MeW—K(Ac)-Pen(3)-TMAPF-2Nal-THP-K(NMeAc)—N-3Pya-NMeK(PEG2PEG2K(PEG2PEG2PEG2PEG2gEC12)₂)—CONH2;
[2942] cPEG3aCO-Pen(3)—N(N(Me)2)-T-7MeW—K(PEG2PEG2gEC14)-Pen(3)-TMAPF-2Nal-THP-K(PEG2PEG2gEC14)—N-3Pya-Sar-CON(Me)2;
[2943] cPEG3aCO-Pen(3)—N(N(Me)2)-T-7MeW-Dap(NMeAc)-Pen(3)-TMAPF-2Nal-THP-K(NMeAc)—N-3Pya-Sar-CON(Me)2;
[2944] cPEG3aCO-Pen(3)—N(N(Me)2)-T-7MeW—K(Ac)-Pen(3)-TMAPF-2Nal-THP-Dap(NMeAc)—N-3Pya-Sar-CON(Me)2;
[2945] cPEG3aCO-Pen(3)—N(N(Me)2)-T-7MeW—K(NMeAc)-Pen(3)-Tzl(Ch)-2Nal-THP-K(NMeAc)—N-3Pya-Sar-CON(Me)2;
[2946] cPEG3aCO-Pen(3)—N(N(Me)2)-T-7MeW—K(NMeAc)-Pen(3)-TzlChmPEG-2Nal-THP-K(NMeAc)—N-3Pya-Sar-CON(Me)2;
[2947] cPEG3aCO-Pen(3)—N(N(Me)2)-T-7MeW—K(NMeAc)-Pen(3)-TzlChmPEG3-2Nal-THP-K(NMeAc)—N-3Pya-Sar-CON(Me)2;
[2948] cPEG3aCO-Pen(3)—N(N(Me)2)-T-7MeW—K(NMeAc)-Pen(3)—Y(C9OH)-2Nal-THP-K(NMeAc)—N-3Pya-Sar-CON(Me)2;
[2949] cPEG3aCO-Pen(3)—N(N(Me)2)-T-7MeW—K(NMeAc)-Pen(3)—Y(OEOXIMECh)-2Nal-THP-K(NMeAc)—N-3Pya-Sar-CON(Me)2;
[2950] cPEG3aCO-Pen(3)—N(N(Me)2)-T-7MeW—K(NMeAc)-Pen(3)—Y(OTzlCh)-2Nal-THP-K(NMeAc)—N-3Pya-Sar-CON(Me)2;
[2951] cPEG3aCO-Pen(3)—N(N(Me)2)-T-7MeW—K(NMeAc)-Pen(3)—Y(OTzlChC16)-2Nal-THP-K(NMeAc)—N-3Pya-Sar-CON(Me)2;
[2952] cPEG3aCO-Pen(3)—N(N(Me)2)-T-7MeW—K(NMeAc)-Pen(3)—Y(OTzlC1aC8)-2Nal-THP-K(NMeAc)—N-3Pya-Sar-CON(Me)2;
[2953] cPEG3aCO-Pen(3)—N(N(Me)2)-T-7MeW—K(NMeAc)-Pen(3)—Y(OTzlChmPEG)-2Nal-THP-K(NMeAc)—N-3Pya-Sar-CON(Me)2;
[2954] cPEG3aCO-Pen(3)—N(N(Me)2)-T-7MeW—K(NMeAc)-Pen(3)—Y(OTzlChmPEG3)-2Nal-THP-K(NMeAc)—N-3Pya-Sar-CON(Me)2;
[2955] cPEG3aCO-Pen(3)—N(N(Me)2)-T-7MeW—K(NMeAc)-Pen(3)—Y(OTz1TMA4)-2Nal-THP-K(NMeAc)—N-3Pya-Sar-CON(Me)2;
[2956] cPEG3aCO-Pen(3)—N(N(Me)2)-T-7MeW—K(NMeAc)-Pen(3)—Y(OTz1TMA4)-2Nal-THP-K(NMeAc)—N-3Pya-Sar-CON(Me)2;
[2957] cPEG3aCO-Pen(3)—N(N(Me)2)-T-7MeW—K(NMeAc)-Pen(3)—Y(OZOXIMECh)-2Nal-THP-K(NMeAc)—N-3Pya-Sar-CON(Me)2;
[2958] cPEG3aCO-Pen(3)—N(N(Me)2)-T-7MeW—K(NMeAc)-Pen(3)—YC8CO(NHPEG3a)-2Nal-THP-K(NMeAc)—N-3Pya-Sar-CON(Me)2;
[2959] cPEG3aCO-Pen(3)—N(N(Me)2)-T-7MeW—K(NMeAc)-Pen(3)-YC8COPip-2Nal-THP-K(NMeAc)—N-3Pya-Sar-CON(Me)2;
[2960] cPEG3gCO-Pen(3)—N(N(Me)2)-T-7MeW—K(NMeAc)-Pen(3)-APEG3F-2Nal-THP-K(NMeAc)—N-3Pya-Sar-CON(Me)2;
[2961] cPEG3gCO-Pen(3)—N(N(Me)2)-T-7MeW—K(NMeAc)-Pen(3)-TMAPF-2Nal-THP-K(NMeAc)—N-3Pya-Sar-CON(Me)2;
   [2962] or a pharmaceutically acceptable salt thereof.

### Clause 14

[2963] 14. A compound of Formula (V)

[chemical structure]

[2964] wherein:
   [2965] R¹ is —C(O)C₍₁₋₂₎alkyl, —C(O)CF₃, —COCH₂CF₃, —CO(CH₂)₅N(CH₃)₃+AN⁻, —CH₂CH₂NHC(O)CH₂O(CH₂CH₂O)₂CH₃, —CH₂CH₂NHC(O)(CH₂CH₂O)₆CH₃,

[chemical structure]

[2966] wherein:
   [2967] R^{a} is

[chemical structure]

CH₂CH₂OCH₂CH₂N(CH₃)₂,
[2968] —(CH₂CH₂O)₃CH₂CH₂N(CH₃)₂, —(CH₂CH₂O)₃CH₂CH₂N(CH₃)₃ ⁺AN⁻, —(CH₂CH₂O)₅CH₂CH₂NC(O)CH₃, —(CH₂CH₂O)₈CH₂CH₂NC(O)CH₃, or
[2969] X3 is a direct bond, (D) arginine, (D) lysine substituted with R^{b},

[chemical structure]

[2970] wherein:
   [2971] R^{b} is

[chemical structure]

[2972] R² is H, —CH(CH₃)₂,

[chemical structure]

[2973] wherein:
   [2974] R^{c} is H, or —CH₃;
   [2975] R^{c}′ is H, or —CH₃;
   [2976] R^{d} is

[chemical structure]

[2977] X8

[chemical structure]

[2978] wherein:
   [2979] R^{e} is H, or —CH₃;
   [2980] R^{ee} is H;
   [2981] R^{f} is H, —CH₃, —C(CH₃)₃, —C(O)CH₃, —C(O)(CH₂CH₂O)₆CH₃, —(CH₂CH₂O)₆CH₃,

[chemical structure]

[2982] R^{g} is H, —OH, —C(O)NH₂, or —CH₂NHC(O)CH₃;
[2983] n is 0, or 1;
[2984] X12 is absent,

[chemical structure]

[2985] R⁶ is —CH₃, —CH₂CH₂C(O)R^{m}—(CH₂)ₛNRⁿR^{o},

[chemical structure]

[2986] R⁷ is H, or —CH₃;
[2987] wherein:
   [2988] R^{m} is —OH, or

[chemical structure]

[2989] Rⁿ is H, —CH₃, —CH₂CH(CH₃)₂, —C(O)CH₃, —C(O)(CH₂CH₂O)₆CH₃, —(CH₂CH₂O)₆CH₃, —C(O)(CH₂CH₂O)ₜCH₂CH₂R^{p},

[chemical structure]

[2990] R^{o} is H, —CH₃, or —C(O)CH₃;
[2991] wherein:
   [2992] R^{p} is NHC(O)CH₃, or

[chemical structure]

[2993] s is 1, 2, or 4;
[2994] t is 2, 6, 9, or 12;
[2995] u is 2 or 3;
[2996] v is 10 or 12;
[2997] R⁸ is —CH₂CH₂CH₂NHC(O)CH₃, —C(O)NH₂, or —C(O)NHCH₃;
[2998] X15 is absent,

[chemical structure]

[2999] wherein:
   [3000] AN⁻as above defined for A, R, X3, X12, R1, R2, R5, R6, R8, R15, R16 and R^{a}, R^{b}, R^{d}, R^{f}, R^{h}, Rⁱ, R^{j}, R^{k}, R^{m}, Rⁿ, R^{o}, R^{s} is acetate, adipate, benzoate, benzenesulfonate, citrate, decanoate, chloride, lactate, maleate, methanesulfonate, oxalate, pivalate, propionate, succinate, sulfate, tartrate, or trifluoroacetate; or
[3001] a pharmaceutically acceptable salt thereof.

[3002] Clause 15

[3003] 15. The compound of clause 14 which is
[3004] MeCO-Pen(3)—N-T-7MeW—K(Ac)-Pen(3)-AEF-2Nal-aMeK—K(Ac)—N-dK-NMeDTyr-CONH2;
[3005] MeCO-Pen(3)—N-T-7MeW—K(Ac)-Pen(3)-AEF-2Nal-aMeK—K(Ac)—N-dL-NMeDTyr-CONH2;
[3006] MeCO-Pen(3)—N-T-7MeW—K(Ac)-Pen(3)-AEF-2Nal-aMeK—K(Ac)—N—F—NMeDTyr-CONH2;
[3007] MeCO-Pen(3)—N-T-7MeW—K(Ac)-Pen(3)-AEF-2Nal-aMeK—K(Ac)—N—H—NMeDTyr-CONH2;
[3008] MeCO-r-Pen(3)—N-T-7MeW—K(Ac)-Pen(3)-AEF-2Nal-aMeK-E-N—H—NMeDTyr-CONH2;
[3009] MeCO-Pen(3)—N-T-7MeW—K(Ac)-Pen(3)-AEF-2Nal-aMeK—K(Ac)—N-Paf-NMeDTyr-CONH2;
[3010] MeCO-r-Pen(3)—N-T-7MeW—K(Ac)-Pen(3)-AEF-2Nal-THP-E-N-h-NMeDTyr-CONH2;
[3011] MeCO-r-Pen(3)—N-T-7MeW—K(Ac)-Pen(3)-AEF-2Nal-THP-E-N—N—NMeDTyr-CONH2;
[3012] MeCO-Pen(3)—N-T-7MeW—K(Ac)-Pen(3)-AEF-2Nal-aMeK—K(Ac)—N—N—NMeDTyr-CONH2;
[3013] MeCO-Pen(3)—N-T-7MeW—K(Ac)-Pen(3)-AEF-2Nal-aMeK—K(Ac)—N-v-NMeDTyr-CONH2;
[3014] MeCO-Pen(3)—N-T-7MeW—K(Ac)-Pen(3)-AEF-2Nal-aMeK—K(Ac)—N-t-NMeDTyr-CONH2;
[3015] MeCO-r-Pen(3)—N-T-7MeW-Cit-Pen(3)-AEF-2Nal-aMeL-E-N-k-NMeDTyr-CONH2;
[3016] MeCO-r-Pen(3)—N-T-7MeW-Cit-Pen(3)-AEF-2Nal-aMeL-E-N-h-NMeDTyr-CONH2;
[3017] MeCO-Pen(3)—N-T-7MeW—K(Ac)-Pen(3)-AEF-2Nal-aMeK—K(Ac)—N-orn-NMeDTyr-CONH2;
[3018] MeCO-Pen(3)—N-T-7MeW—K(Ac)-Pen(3)-AEF-2Nal-aMeK—K(Ac)—N-s-NMeDTyr-CONH2;
[3019] MeCO-Pen(3)—N-T-7MeW—K(Ac)-Pen(3)-AEF-2Nal-aMeK—K(Ac)—N-f-NMeDTyr-CONH2;
[3020] MeCO-Pen(3)—N-T-7MeW—Y-Pen(3)-AEF-2Nal-aMeK—K(Ac)—N-k-NMeDTyr-CONH2;
[3021] MeCO-Pen(3)—N-T-7MeW-4AmPhe-Pen(3)-AEF-2Nal-aMeK—K(Ac)—N-k-NMeDTyr-CONH2;
[3022] MeCO-Pen(3)—N-T-7MeW-Paf(Ac)-Pen(3)-AEF-2Nal-aMeK—K(Ac)—N-k-NMeDTyr-CONH2;
[3023] MeCO-Pen(3)—N-T-7MeW—K(Ac)-Pen(3)-AEF-2Nal-aMeK—K(Ac)—N-y-NMeDTyr-CONH2;
[3024] MeCO-Pen(3)—N-T-7MeW-Cit-Pen(3)-AEF-2Nal-aMeL-K(Ac)—N-k-NMeDTyr-CONH2;
[3025] MeCO-Pen(3)—N-T-7MeW—K(Ac)-Pen(3)-AEF-2Nal-aMeK—K(Ac)—N-h-NMeDTyr-CONH2;
[3026] MeCO-Pen(3)—N-T-7MeW—K(Ac)-Pen(3)-AEF-2Nal-aMeK—K(Ac)—N-bAla-NMeDTyr-CONH2;
[3027] MeCO-Pen(3)—N-T-7MeW—K(Ac)-Pen(3)-AEF-2Nal-aMeK—K(Ac)—N-bAla-NMeDTyr-CONH2;
[3028] MeCO-Pen(3)—N-T-7MeW—K(Ac)-Pen(3)-AEF-2Nal-aMeK—K(Ac)—N-bAla-NMeDTyr-CONH2;
[3029] MeCO-Pen(3)—N-T-7MeW—K(Ac)-Pen(3)-AEF-2Nal-aMeK—K(Ac)—N-3Pya-NMeDTyr-CONH2;
[3030] MeCO-Pen(3)—N-T-7MeW—K(Ac)-Pen(3)-AEF-2Nal-aMeK—K(Ac)—N-3pya-NMeDTyr-CONH2;
[3031] MeCO-r-Pen(3)—N-T-7MeW—K(Ac)-Pen(3)-AEF-2Nal-THP-E-N-3Pya-NMeDTyr-CONH2;
[3032] MeCO-r-Pen(3)-Q-T-W-Q-Pen(3)-AEF-2Nal-THP-aMeE-N—F—NMeDTyr-CONH2;
[3033] MeCO-r-Pen(3)-Q-T-W-Q-Pen(3)-AEF-2Nal-THP-E-N—N—NMe DTyr-CONH2;
   [3034] or a pharmaceutically acceptable salt thereof.

### Clause 16.

[3035] 16. A compound of Formula (VI)

[chemical structure]

[3036] wherein:
   [3037] R¹ is —C(O)C₍₁₋₂₎alkyl, —C(O)CF₃, —COCH₂CF₃, —CO(CH₂)₅N(CH₃)₃⁺AN⁻, —CH₂CH₂NHC(O)CH₂O(CH₂CH₂O)₂CH₃, —CH₂CH₂NHC(O)(CH₂CH₂O)₆CH₃,

[chemical structure]

[3038] wherein:
   [3039] R^{a} is

[chemical structure]

CH₂CH₂OCH₂CH₂N(CH₃)₂,
[3040] —(CH₂CH₂O)₃CH₂CH₂N(CH₃)₂, —(CH₂CH₂O)₃CH₂CH₂N(CH₃)₃ ⁺AN⁻, —(CH₂CH₂O)₅CH₂CH₂NC(O)CH₃, —(CH₂CH₂O)₈CH₂CH₂NC(O)CH₃, or —(CH₂CH₂O)₁₁CH₂CH₂NC(O)CH₃;
[3041] X3 is a direct bond, (D) arginine, (D) lysine substituted with R^{b},

[chemical structure]

[3042] wherein
   [3043] R^{b} is

[chemical structure]

[3044] R² is H, —CH(CH₃)₂,

[chemical structure]

[3045] wherein:
   [3046] R^{c} is H, or —CH₃;
   [3047] R^{c}′ is H, or —CH₃;
   [3048] R^{d} is

[chemical structure]

[3049] R³ is H, —CH₃, —CF₃, or

[chemical structure]

[3050] R⁴ is H, or —CH₃;
[3051] X8 is

[chemical structure]

[3052] wherein:
   [3053] R^{e} is H, or —CH₃;
   [3054] R^{ee} is H;
   [3055] R^{f} is H, —CH₃, —C(CH₃)₃, —C(O)CH₃, —C(O)(CH₂CH₂O)₆CH₃, —(CH₂CH₂O)₆CH₃,

[chemical structure]

[3056] R^{g} is H, —OH, —C(O)NH₂, or —CH₂NHC(O)CH₃;
[3057] n is 0, or 1;
[3058] X12 is absent,

[chemical structure]

[3059] R⁶ is —CH₃—CH₂CH₂C(O)R^{m}, —(CH₂)ₛNRⁿR^{o},

[chemical structure]

[3060] R⁷ is H, or —CH₃;
[3061] wherein:
   [3062] R^{m} is —OH, or

[chemical structure]

[3063] Rⁿ is H, —CH₃, —CH₂CH(CH₃)₂, —C(O)CH₃, —C(O)(CH₂CH₂O)₆CH₃, —(CH₂CH₂O)₆CH₃, —C(O)(CH₂CH₂O)ₜCH₂CH₂R^{p},

[chemical structure]

[3064] R^{o} is H, —CH₃, or —C(O)CH₃;
[3065] wherein:
   [3066] R^{p} is NHC(O)CH₃, or

[chemical structure]

[3067] s is 1,2, or 4;
[3068] t is 2, 6, 9, or 12;
[3069] u is 2 or 3;
[3070] v is 10 or 12;
[3071] R⁸ is —CH₂CH₂CH₂NHC(O)CH₃, —C(O)NH₂, or —C(O)NHCH₃;
[3072] X15 is absent,

[chemical structure]

[3073] X16 is absent,

[chemical structure]

[3074] wherein:
   [3075] R^{q} is

[chemical structure]

[3076] R^{r} is H;
[3077] w is 2 4, or 5;
[3078] x is 2 or 4; and
[3079] R⁹ is —NH₂, —NHCH₃, —N(CH₃)₂, —NH(CH₂CH₂O)₂CH₃, —N(CH₃)(CH₂CH₂O)₂CH₃, —NH(CH₂CH₂O)_{y}R^{s} or

[chemical structure]

[3080] wherein:
   [3081] y is 2, 4, or 6;
   [3082] R^{s} is —CH₃, or

[chemical structure]

[3083] wherein:
   [3084] AN⁻as above defined for A, R, X3, X12, R1, R2, R5, R6, R8, R15, R16 and R^{a}, R^{b}, R^{d}, R^{f}, R^{h}, Rⁱ, R^{j}, R^{k}, R^{m}, Rⁿ, R^{o}, R^{s} is acetate, adipate, benzoate, benzenesulfonate, citrate, decanoate, chloride, lactate, maleate, methanesulfonate, oxalate, pivalate, propionate, succinate, sulfate, tartrate, or trifluoroacetate; or
[3085] a pharmaceutically acceptable salt thereof.

### Clause 17

[3086] 17. The compound of clause 16 wherein
[3087] AN⁻is chloride;
[3088] or a pharmaceutically acceptable salt thereof.

### Clause 18

[3089] 18. The compound of clause 16 which is
[3090] cPEG3aCO-Pen(3)—N(N(Me)2)-T-7MeW—K(NMeAC)-Pen(3)-TMAPF-2Nal-THP-K(NMeAC)—N-3Pya-NMeK(PEG2PEG2C12)—CONH2;
[3091] cPEG3aCO-Pen(3)—N(N(Me)2)-T-7MeW—K(Ac)-Pen(3)-TMAPF-2Nal-THP-K(NMeAc)—N-3Pya-NMeK(PEG2PEG2C14)—CONH2;
[3092] C12gEPEG2PEG2CO-Pen(3)—N(N(Me)2)-T-7MeW—K(Ac)-Pen(3)-TMAPF-2Nal-THP-K(NMeAc)—N-3Pya-NMeK(PEG2PEG2gEC12)—CONH2;
[3093] cPEG3aCO-Pen(3)—K(PEG2PEG2gEC12)-T-7MeW—K(Ac)-Pen(3)-TMAPF-2Nal-THP-K(NMeAc)—N-3Pya-NMeK(PEG2PEG2gEC12)—CONH2;
[3094] cPEG3aCO-Pen(3)—N-T-7MeW—K(Ac)-Pen(3)-TMAPF-2Nal-THP-K(PEG2PEG2gEC12)—N-3Pya-NMeK(PEG2PEG2gEC12)—CONH2;
[3095] cPEG3aCO-Pen(3)—N-T-7MeW—K(Ac)-Pen(3)-TMAPF-2Nal-THP-K(NMeAc)—N-3Pya-NMeK(PEG2PEG2gEC12)—CONH2;
[3096] cPEG3aCO-Pen(3)—N(N(Me)2)-T-7MeW—K(Ac)-Pen(3)-TMAPF-2Nal-THP-K(NMeAC)—N-3Pya-NMeK(PEG2PEG2gEC12)—CONH2;
[3097] cPEG3aCO-Pen(3)—N(N(Me)2)-T-7MeW—K(NMeAC)-Pen(3)-TMAPF-2Nal-THP-K(NMeAC)—N-3Pya-NMeK(PEG2PEG2gEC12)—CONH2;
[3098] cPEG3aCO-k(PEG2PEG2gEC12)-Pen(3)—N(N(Me)2)-T-7MeW—K(Ac)-Pen(3)-TMAPF-2Nal-THP-K(NMeAc)—N-3Pya-NMeK(PEG2PEG2gEC12)—CONH2;
[3099] cPEG3aCO-Pen(3)—N(N(Me)2)-T-7MeW—K(PEG2PEG2gEC12)-Pen(3)-TMAPF-2Nal-THP-K(NMeAc)—N-3Pya-NMeK(PEG2PEG2gEC12)—CONH2;
[3100] cPEG3aCO-Pen(3)—N(N(Me)2)-T-7MeW—K(Ac)-Pen(3)-TMAPF-2Nal-THP-K(PEG2PEG2gEC12)—N-3Pya-NMeK(PEG2PEG2gEC12)—CONH2;
[3101] C14gEPEG2PEG2CO-Pen(3)—N(N(Me)2)-T-7MeW—K(Ac)-Pen(3)-TMAPF-2Nal-THP-K(NMeAc)—N-3Pya-NMeK(PEG2PEG2gEC14)—CONH2;
[3102] cPEG3aCO-Pen(3)—K(PEG2PEG2gEC14)-T-7MeW—K(Ac)-Pen(3)-TMAPF-2Nal-THP-K(NMeAc)—N-3Pya-NMeK(PEG2PEG2gEC14)—CONH2;
[3103] cPEG3aCO-Pen(3)—N(N(Me)2)-T-7MeW—K(NMeAC)-Pen(3)-TMAPF-2Nal-THP-K(NMeAC)—N-3Pya-NMeK(PEG2PEG2gEC14)—CONH2;
[3104] cPEG3aCO-k(PEG2PEG2gEC14)-Pen(3)—N(N(Me)2)-T-7MeW—K(Ac)-Pen(3)-TMAPF-2Nal-THP-K(NMeAc)—N-3Pya-NMeK(PEG2PEG2gEC14)—CONH2;
[3105] cPEG3aCO-Pen(3)—N(N(Me)2)-T-7MeW—K(Ac)-Pen(3)-TMAPF-2Nal-THP-K(PEG2PEG2gEC14)—N-3Pya-NMeK(PEG2PEG2gEC14)—CONH2;
[3106] cPEG3aCO-Pen(3)—N(N(Me)2)-T-7MeW—K(PEG2PEG2gEC14)-Pen(3)-TMAPF-2Nal-THP-K(NMeAc)—N-3Pya-NMeK(PEG2PEG2gEC14)—CONH2;
[3107] cPEG3aCO-Pen(3)—N(N(Me)2)-T-7MeW—K(Ac)-Pen(3)-TMAPF-2Nal-THP-K(NMeAc)—N-3Pya-NMeK(PEG2PEG2K(PEG2PEG2gEC12)₂)—CONH2;
[3108] cPEG3aCO-Pen(3)—N(N(Me)2)-T-7MeW—K(Ac)-Pen(3)-TMAPF-2Nal-THP-K(NMeAc)—N-3Pya-NMeK(PEG2PEG2K(PEG2PEG2PEG2PEG2gEC12)₂)—CONH2;
[3109] cPEG3aCO-Pen(3)—N(N(Me)2)-T-7MeW—K(Ac)-Pen(3)-TMAPF-2Nal-THP-K(PEG2PEG2PEG2gEC12))—N-3Pya-NMeK(PEG2PEG2PEG2gEC12)—CONH2;
[3110] cPEG3aCO-k(PEG2PEG2PEG2PEG2gEC12)-Pen(3)—N(N(Me)2)-T-7MeW—K(Ac)-Pen(3)-TMAPF-2Nal-THP-K(NMeAc)—N-3Pya-NMeK(PEG2PEG2PEG2PEG2gEC12)—CONH2;
[3111] cPEG3aCO-Pen(3)—N(N(Me)2)-T-7MeW—K(Ac)-Pen(3)-TMAPF-2Nal-THP-K(NMeAc)—N-3Pya-NMeK(PEG2PEG6gEC12)—CONH2;
[3112] cPEG3aCO-k(PEG2PEG6gEC12)-Pen(3)—N(N(Me)2)-T-7MeW—K(Ac)-Pen(3)-TMAPF-2Nal-THP-K(NMeAc)—N-3Pya-NMeK(PEG2PEG6gEC12)—CONH2;
[3113] cPEG3aCO-Pen(3)—N(N(Me)2)-T-7MeW—K(Ac)-Pen(3)-TMAPF-2Nal-THP-K(NMeAc)—N-3Pya-NMeK(PEG2PEG6gEC14)—CONH2;
[3114] cPEG3aCO-Pen(3)—N(N(Me)2)-T-7MeW—K(Ac)-Pen(3)-TMAPF-2Nal-THP-K(NMeAc)—N-3Pya-NMeK(SP6PEG2PEG2C12)—CONH2;
[3115] cPEG3aCO-Pen(3)—N(N(Me)2)-T-7MeW—K(Ac)-Pen(3)-TMAPF-2Nal-THP-K(NMeAc)—N-3Pya-NMeK(SP6PEG2PEG2gEC12)—CONH2;
[3116] 4cpgCO-Pen(3)—N(N(Me)2)-T-7MeW—K(NMeAc)-Pen(3)-TMAPF-2Nal-THP-K(NMeAc)—N-3Pya-Sar-CON(Me)2;
[3117] 5cpaCO-Pen(3)—N(N(Me)2)-T-7MeW-Q(N(Me)2)-Pen(3)-TMAPF-2Nal-THP-Q(N(Me)2)—N-3Pya-Sar-CON(Me)2;
[3118] 5cpaCO-Pen(3)—N(N(Me)2)-T-7MeW—K(NMeAc)-Pen(3)-TMAPF-2Nal-THP-K(NMeAc)—N-3Pya-Sar-CON(Me)2;
[3119] C12gEPEG2PEG2CO-hk(Me)₃-Pen(3)—N(N(Me)2)-T-7MeW—K(NMeAc)-Pen(3)-TMAPF-2Nal-THP-K(NMeAc)—N-3Pya-Sar-CON(Me)2;
[3120] C12gEPEG2PEG2CO-hk(Me)₃-Pen(3)—N(N(Me)2)-T-7MeW—K(PEG2PEG2gEC12)-Pen(3)-TMAPF-2Nal-THP-K(NMeAc)—N-3Pya-Sar-CON(Me)2;
[3121] C12gEPEG2PEG2CO-hk(Me)₃-Pen(3)—N(N(Me)2)-T-7MeW—K(NMeAc)-Pen(3)-TMAPF-2Nal-THP-K(PEG2PEG2gEC12)—N-3Pya-Sar-CON(Me)2;
[3122] C12gEPEG2PEG2CO-hk(Me)₃-Pen(3)—N(N(Me)2)-T-7MeW—K(NMeAc)-Pen(3)-TMAPF-2Nal-K(PEG2PEG2gEC12)—N-3Pya-Sar-CON(Me)2;
[3123] C12gEPEG2PEG2CO-k(PEG2PEG2gEC12)-Pen(3)—N(N(Me)2)-T-7MeW-Dab(NMeAc)-Pen(3)-TMAPF-2Nal-THP-K(NMeAc)—N-3Pya-Sar-CON(Me)2;
[3124] C14gEPEG2PEG2CO-hk(Me)₃-Pen(3)—K(PEG2PEG2gEC14)-T-7MeW—K(NMeAc)-Pen(3)-TMAPF-2Nal-THP-K(NMeAc)—N-3Pya-Sar-CON(Me)2;
[3125] C14gEPEG2PEG2CO-hk(Me)₃-Pen(3)—N(N(Me)2)-T-7MeW—K(NMeAc)-Pen(3)-TMAPF-2Nal-THP-K(NMeAc)—N-3Pya-Sar-CON(Me)2;
[3126] C14gEPEG2PEG2CO-hk(Me)₃-Pen(3)—N(N(Me)2)-T-7MeW—K(PEG2PEG2gEC14)-Pen(3)-TMAPF-2Nal-THP-K(NMeAc)—N-3Pya-Sar-CON(Me)2;
[3127] C14gEPEG2PEG2CO-hk(Me)₃-Pen(3)—N(N(Me)2)-T-7MeW—K(NMeAc)-Pen(3)-TMAPF-2Nal-THP-K(PEG2PEG2gEC14)—N-3Pya-Sar-CON(Me)2;
[3128] C14gEPEG2PEG2CO-k(PEG2PEG2gEC14)-Pen(3)—N(N(Me)2)-T-7MeW-Dab(NMeAc)-Pen(3)-TMAPF-2Nal-THP-K(NMeAc)—N-3Pya-Sar-CON(Me)2;
[3129] cPEG2gCO-Pen(3)—N(N(Me)2)-T-7MeW—K(NMeAc)-Pen(3)-TMAPF-2Nal-THP-K(NMeAc)—N-3Pya-Sar-CON(Me)2;
[3130] cPEG3aCO-Pen(3)—K(cPEG3a)-T-7MeW—K(NMeAc)-Pen(3)-TMAPF-2Nal-THP-K(NMeAc)—N-3Pya-Sar-CON(Me)2;
[3131] cPEG3aCO-Pen(3)—K(Me)₃-T-7MeW—K(NMeAc)-Pen(3)-TMAPF-2Nal-THP-K(NMeAc)—N-3Pya-Sar-CON(Me)2;
[3132] cPEG3aCO-Pen(3)—K(Me)₃-T-7MeW—K(NMeAc)-Pen(3)-TMAPF-2Nal-Achx-K(NMeAc)—N-3Pya-Sar-CON(Me)2;
[3133] cPEG3aCO-k(PEG2PEG2gEC12)-Pen(3)—K(PEG2PEG2gEC12)-T-7MeW—K(NMeAc)-Pen(3)-TMAPF-2Nal-THP-K(NMeAc)—N-3Pya-Sar-CON(Me)2;
[3134] cPEG3aCO-Pen(3)—K(PEG2PEG2gEC12)-T-7MeW—K(NMeAc)-Pen(3)-TMAPF-2Nal-THP-K(NMeAc)—N-3Pya-Sar-CON(Me)2;
[3135] cPEG3aCO-Pen(3)—K(PEG2PEG2gEC12)-T-7MeW—K(PEG2PEG2gEC12)-Pen(3)-TMAPF-2Nal-THP-K(NMeAc)—N-3Pya-Sar-CON(Me)2;
[3136] cPEG3aCO-Pen(3)—K(PEG2PEG2gEC12)-T-7MeW—K(NMeAc)-Pen(3)-TMAPF-2Nal-THP-K(PEG2PEG2gEC12)—N-3Pya-Sar-CON(Me)2;
[3137] cPEG3aCO-k(PEG2PEG2gEC14)-Pen(3)—K(PEG2PEG2gEC14)-T-7MeW—K(NMeAc)-Pen(3)-TMAPF-2Nal-THP-K(NMeAc)—N-3Pya-Sar-CON(Me)2;
[3138] cPEG3aCO-Pen(3)—K(PEG2PEG2gEC14)-T-7MeW—K(NMeAc)-Pen(3)-TMAPF-2Nal-THP-K(NMeAc)—N-3Pya-Sar-CON(Me)2;
[3139] cPEG3aCO-Pen(3)—K(PEG2PEG2gEC14)-T-7MeW—K(PEG2PEG2gEC14)-Pen(3)-TMAPF-2Nal-THP-K(NMeAc)—N-3Pya-Sar-CON(Me)2;
[3140] cPEG3aCO-Pen(3)—K(PEG2PEG2gEC14)-T-7MeW—K(NMeAc)-Pen(3)-TMAPF-2Nal-THP-K(PEG2PEG2gEC14)—N-3Pya-Sar-CON(Me)2;
[3141] cPEG3aCO-Pen(3)—N-T-7MeW—K(NMeAc)-Pen(3)-TMAPF-2Nal-THP-K(NMeAc)—N-3Pya-Sar-CONH2;
[3142] cPEG3aCO-Pen(3)—N-T-7MeW—K(NMeAc)-Pen(3)-TMAPF-2Nal-THP-K(NMeAc)—N-3Pya-Sar-CON(Me)2;
[3143] cPEG3aCO-Pen(3)—N-T-7MeW—K(NMeAC)-Pen(3)-TMAPF-2Nal-THP-Dab(NMeAc)—N-3Pya-Sar-CON(Me)2;
[3144] cPEG3aCO-Pen(3)—N-T-7MeW-Dab(NMeAc)-Pen(3)-TMAPF-2Nal-THP-K(NMeAC)—N-3Pya-Sar-CON(Me)2;
[3145] cPEG3aCO-Pen(3)—N-T-7MeW—K(Ac)-Pen(3)-TMAPF-2Nal-THP-A-N-3Pya-Sar-CON(Me)2;
[3146] cPEG3aCO-Pen(3)—N-T-7MeW—K(Ac)-Pen(3)-TMAPF-2Nal-THP-E-N-3Pya-Sar-CONH2;
[3147] cPEG3aCO-Pen(3)—N-T-7MeW—K(Ac)-Pen(3)-TMAPF-2Nal-THP—K(Ac)—N-3Pya-Sar-CONH2;
[3148] cPEG3aCO-Pen(3)—N-T-7(3NAcPh)W—K(Ac)-Pen(3)-TMAPF-2Nal-THP-E-N-3Pya-Sar-CONH2;
[3149] cPEG3aCO-Pen(3)—N(N(Me))-T-7MeW—K(NMeAc)-Pen(3)-TMAPF-2Nal-THP-K(NMeAc)—N-3Pya-Sar-CON(Me)2;
[3150] cPEG3aCO-Pen(3)—N(N(Me)2)-T-7MeW—K(NMeAc)-Pen(3)-TMAPF-2Nal-THP-K(NMeAc)—N-3Pya-Sar-CON(Me)2;
[3151] cPEG3aCO-Pen(3)—N(N(Me)2)-T-7MeW—K(NMeAc)-Pen(3)-TMAPF-2Nal-THP-E-N-3Pya-Sar-CON(Me)2;
[3152] cPEG3aCO-Pen(3)—N(N(Me)2)-T-7MeW—K(NMeAc)-Pen(3)-TMAPF-2Nal-THP-K(NMeAc)—N-3Pya-Sar-CO(NHPEG3a);
[3153] cPEG3aCO-Pen(3)—N(N(Me)2)-T-7MeW-APEG2Ser(S*)-Pen(3)-TMAPF-2Nal-THP-K(NMeAc)—N-3Pya-Sar-CON(Me)2;
[3154] cPEG3aCO-Pen(3)—N(N(Me)2)-T-7MeW-APEG2Ser(R*)-Pen(3)-TMAPF-2Nal-THP-K(NMeAc)—N-3Pya-Sar-CON(Me)2;
[3155] cPEG3aCO-Pen(3)—N(N(Me)2)-T-7(3NAcPh)W—K(NMeAc)-Pen(3)-TMAPF-2Nal-THP-K(NMeAc)—N-3Pya-Sar-CON(Me)2;
[3156] cPEG3aCO-Pen(3)—N(N(Me)2)-T-7MeW—K(NMeAC)-Pen(3)-TMAPF-2Nal-THP-Dab(NMeAc)—N-3Pya-Sar-CON(Me)2;
[3157] cPEG3aCO-Pen(3)—N(N(Me)2)-T-7MeW—K(Ac)-Pen(3)-TMAPF-2Nal-THP-Dab(NMeAc)—N-3Pya-Sar-CON(Me)2;
[3158] cPEG3aCO-Pen(3)—N(N(Me)2)-T-7MeW—K(NMeAC)-Pen(3)-TMAPF-2Nal-THP-Q(N(Me)2)—N-3Pya-Sar-CON(Me)2;
[3159] cPEG3aCO-Pen(3)—N(N(Me)2)-T-7MeW-Q(N(Me)2)-Pen(3)-TMAPF-2Nal-THP-K(NMeAC)—N-3Pya-Sar-CON(Me)2;
[3160] cPEG3aCO-Pen(3)—N(N(Me)2)-T-7MeW—K(NMeAc)-Pen(3)-TMAPF-2Nal-THP-A-N-3Pya-Sar-CON(Me)2;
[3161] cPEG3aCO-Pen(3)—N(N(Me)2)-T-7MeW—K(NMeAc)-Pen(3)-TMAPF-2Nal-THP-K(NMeAc)—N-3Pya-Sar-CONH2;
[3162] cPEG3aCO-Pen(3)—N(N(Me)2)-T-7MeW—K(NMeAc)-Pen(3)-TMAPF-2Nal-THP-Cit-N-3Pya-Sar-CON(Me)2;
[3163] cPEG3aCO-Pen(3)—N(N(Me)2)-T-7MeW—K(Me)₃-Pen(3)-TMAPF-2Nal-THP-K(NMeAc)—N-3Pya-Sar-CON(Me)2;
[3164] cPEG3aCO-Pen(3)—N(N(Me)2)-T-7MeW—K(NMeAc)-Pen(3)-TMAPF-2Nal-Acpx-K(NMeAc)—N-3Pya-Sar-CON(Me)2;
[3165] cPEG3aCO-Pen(3)—N(N(Me)2)-T-7MeW—K(NMeAc)-Pen(3)-TMAPF-2Nal-Achx-K(NMeAc)—N-3Pya-Sar-CON(Me)2;
[3166] cPEG3aCO-Pen(3)—N(N(Me)2)-T-7MeW—K(NMeAc)-Pen(3)-TMAPF-2Nal-Chg-K(NMeAc)—N-3Pya-Sar-CON(Me)2;
[3167] cPEG3aCO-Pen(3)—N(N(Me)2)-T-7MeW—K(NMeAc)-Pen(3)-TMAPF-2Nal-Aib-K(NMeAc)—N-3Pya-Sar-CON(Me)2;
[3168] cPEG3aCO-Pen(3)—N(N(Me)2)-T-7MeW-Cit-Pen(3)-TMAPF-2Nal-THP-K(NMeAc)—N-3Pya-Sar-CON(Me)2;
[3169] cPEG3aCO-Pen(3)—N(N(Me)2)-T-7MeW-Dab(NMeAc)-Pen(3)-TMAPF-2Nal-THP-K(NMeAc)—N-3Pya-Sar-CON(Me)2;
[3170] cPEG3aCO-Pen(3)—N(N(Me)2)-T-7MeW-Dab(NMeAc)-Pen(3)-TMAPF-2Nal-THP-K(NMeAc)—N-3Pya-Sar-CONH2;
[3171] cPEG3aCO-k(PEG2PEG2gEC12)-Pen(3)—N(N(Me)2)-T-7MeW—K(NMeAc)-Pen(3)-TMAPF-2Nal-THP-K(NMeAc)—N-3Pya-Sar-CON(Me)2;
[3172] cPEG3aCO-k(PEG2PEG2gEC14)-Pen(3)—N(N(Me)2)-T-7MeW—K(NMeAc)-Pen(3)-TMAPF-2Nal-THP-K(NMeAc)—N-3Pya-Sar-CON(Me)2;
[3173] cPEG3aCO-k(PEG2PEG2gEC12)-Pen(3)—N(N(Me)2)-T-7MeW—K(PEG2PEG2gEC12)-Pen(3)-TMAPF-2Nal-THP-K(NMeAc)—N-3Pya-Sar-CON(Me)2;
[3174] cPEG3aCO-Pen(3)—N(N(Me)2)-T-7MeW—K(cPEG3a)-Pen(3)-TMAPF-2Nal-THP-K(NMeAc)—N-3Pya-Sar-CON(Me)2;
[3175] cPEG3aCO-Pen(3)—N(N(Me)2)-T-7MeW—K(4cpg)-Pen(3)-TMAPF-2Nal-THP-K(NMeAc)—N-3Pya-Sar-CON(Me)2;
[3176] cPEG3aCO-k(PEG2PEG2gEC12)-Pen(3)—N(N(Me)2)-T-7MeW—K(NMeAc)-Pen(3)-TMAPF-2Nal-THP-K(PEG2PEG2gEC12)—N-3Pya-Sar-CON(Me)2;
[3177] cPEG3aCO-k(PEG2PEG2gEC14)-Pen(3)—N(N(Me)2)-T-7MeW—K(NMeAc)-Pen(3)-TMAPF-2Nal-THP-K(PEG2PEG2gEC14)—N-3Pya-Sar-CON(Me)2;
[3178] cPEG3aCO-Pen(3)—N(N(Me)2)-T-7MeW—K(PEG2PEG2gEC14)-Pen(3)-TMAPF-2Nal-THP-K(NMeAc)—N-3Pya-Sar-CON(Me)2;
[3179] cPEG3aCO-Pen(3)—N(N(Me)2)-T-7MeW—K(PEG2PEG2gEC12)-Pen(3)-TMAPF-2Nal-THP-K(PEG2PEG2gEC12)—N-3Pya-Sar-CON(Me)2;
[3180] cPEG3aCO-Pen(3)—N(N(Me)2)-T-7MeW—K(NMeAc)-Pen(3)-TMAPF-2Nal-THP-K(PEG2PEG2gEC12)—N-3Pya-Sar-CON(Me)2;
[3181] cPEG3aCO-Pen(3)—N(N(Me)2)-T-7MeW—K(NMeAc)-Pen(3)-TMAPF-2Nal-THP-K(PEG2PEG2gEC14)—N-3Pya-Sar-CON(Me)2;
[3182] cPEG3aCO-Pen(3)—N(N(Me)2)-T-7MeW—K(PEG2PEG2gEC14)-Pen(3)-TMAPF-2Nal-THP-K(PEG2PEG2gEC14)—N-3Pya-Sar-CON(Me)2;
[3183] cPEG3aCO-Pen(3)—N(N(Me)2)-T-7MeW-Dap(NMeAc)-Pen(3)-TMAPF-2Nal-THP-K(NMeAc)—N-3Pya-Sar-CON(Me)2;
[3184] cPEG3aCO-Pen(3)—N(N(Me)2)-T-7MeW—K(Ac)-Pen(3)-TMAPF-2Nal-THP-Dap(NMeAc)—N-3Pya-Sar-CON(Me)2;
[3185] cPEG3gCO-Pen(3)—N(N(Me)2)-T-7MeW—K(NMeAc)-Pen(3)-TMAPF-2Nal-THP-K(NMeAc)—N-3Pya-Sar-CON(Me)2;
[3186] MeCO-Pen(3)—N-T-7MeW—K(NMeAc)-Pen(3)-TMAPF-2Nal-THP-K(NMeAc)—N-3Pya-Sar-CONH2;
[3187] MeCO-Pen(3)—N-T-7MeW—K(Ac)-Pen(3)-TMAPF-2Nal-THP—K(Ac)—N-3Pya-Sar-CONH2;
[3188] MeCO-Pen(3)—N-T-7MeW—K(Ac)-Pen(3)-TMAPF-2Nal-THP-E-N-3Pya-Sar-CONH2;
[3189] MeCO-k(Me)₃-Pen(3)—N-T-7MeW—K(Ac)-Pen(3)-TMAPF-2Nal-THP-E-N-3Pya-Sar-CONH2;
[3190] MeCO-k(Me)₃-Pen(3)—N-T-7(3NAcPh)W—K(Ac)-Pen(3)-TMAPF-2Nal-THP-E-N-3Pya-Sar-CONH2;
[3191] MeCO-k(Me)₃-Pen(3)—N-T-7MeW—K(Ac)-Pen(3)-TMAPF-2Nal-THP—K(Ac)—N-3Pya-Sar-CONH2;
[3192] MeCO-Pen(3)—N-T-7(3NAcPh)W—K(Ac)-Pen(3)-TMAPF-2Nal-THP-E-N-3Pya-Sar-CONH2;
[3193] MeCO-Pen(3)—N-T-7(3NAcPh)W—K(Ac)-Pen(3)-TMAPF-2Nal-THP—K(Ac)—N-3Pya-Sar-CONH2;
[3194] MeCO-r-Pen(3)—N-T-7MeW—K(Ac)-Pen(3)-TMAPF-2Nal-THP-E-N-3Pya-Sar-CONH2;
[3195] MeCO-Pen(3)—N(N(Me)2)-T-7MeW—K(NMeAc)-Pen(3)-TMAPF-2Nal-THP-K(NMeAc)—N-3Pya-Sar-CON(Me)2;
[3196] MeCO-Pen(3)—N(N(Me)2)-T-7MeW—K(NMeAc)-Pen(3)-TMAPF-2Nal-THIP-K(NMeAc)—N-3Pya-Sar-CO(NHPEG3a);
[3197] MeCO-Pen(3)—N(N(Me)2)-T-7MeW—K(NMeAc)-Pen(3)-TMAPF-2Nal-THP-APEG2Ser-N-3Pya-Sar-CON(Me)2;
[3198] MeCO-hk(Me)₃-Pen(3)—N(N(Me)2)-T-7MeW—K(NMeAc)-Pen(3)-TMAPF-2Nal-THP-K(NMeAc)—N-3Pya-Sar-CON(Me)2;
[3199] MeCO-r-Pen(3)—N(N(Me)2)-T-7MeW—K(NMeAc)-Pen(3)-TMAPF-2Nal-THP-K(NMeAc)—N-3Pya-Sar-CON(Me)2; or
   [3200] a pharmaceutically acceptable salt thereof.

### Clause 19

[3201] 19. A compound which is:

[chemical structure]

[3202] or a pharmaceutically acceptable salt thereof.

### Clause 20

[3203] 20. A compound which is

[chemical structure]

[3204] pharmaceutically acceptable salt thereof.

### Clause 21

[3205] 21. The compound or pharmaceutically acceptable salt thereof, according to any one of clauses 19 and 20 wherein the quarternary ammonium salts as shown in the chemical structures therein include a counterion AN⁻selected from: acetate, adipate, benzoate, benzenesulfonate, citrate, decanoate, chloride, lactate, maleate, methanesulfonate, oxalate, pivalate, propionate, succinate, sulfate, tartrate, or trifluoroacetate.

Clause 22. A pharmaceutical composition comprising the peptide inhibitor or pharmaceutically acceptable salt thereof of any one of clauses 1-21, and a pharmaceutically acceptable carrier, excipient, or diluent.
Clause 23. The pharmaceutical composition of clause 22, further comprising an enteric coating.
Clause 24. The pharmaceutical composition of clause 22, wherein the enteric coating protects and releases the pharmaceutical composition within a subject's lower gastrointestinal system.

### Clause 25.

[3206] 25. A method for treating an Inflammatory Bowel Disease (IBD), ulcerative colitis, Crohn's disease, Celiac disease (nontropicalSprue), enteropathy associated with seronegative arthropathies, microscopic colitis, collagenous colitis, eosinophilic gastroenteritis, colitis associated with radio- or chemo-therapy, colitis associated with disorders of innate immunity as in leukocyte adhesion deficiency-1, chronic granulomatous disease, glycogen storage disease type 1b, Hermansky-Pudlak syndrome, Chediak-Higashi syndrome, and Wiskott-Aldrich Syndrome, pouchitis resulting after proctocolectomy and ileoanal anastomosis, gastrointestinal cancer, pancreatitis, insulin-dependent diabetes mellitus, mastitis, cholecystitis, cholangitis, pericholangitis, chronic bronchitis, chronic sinusitis, asthma, psoriasis, psoriatic arthritis, or graft versus host disease in a subject, comprising providing to the subject an effective amount of the peptide inhibitor or peptide inhibitor or pharmaceutically acceptable salt thereof of any one of clauses 1-21, or the pharmaceutical composition of any one of clauses 22-24.

### Clause 26

[3207] 26. The method of clause 25, wherein the pharmaceutical composition is provided to the subject by an oral, parenteral, intravenous, peritoneal, intradermal, subcutaneous, intramuscular, intrathecal, inhalation, vaporization, nebulization, sublingual, buccal, parenteral, rectal, intraocular, inhalation, topically, vaginal, or topical route of administration.

### Clause 27

[3208] 27. The method of clause 24 for treating Inflammatory Bowel Disease (IBD), ulcerative colitis, or Crohn's disease, wherein the pharmaceutical composition is provided to the subject orally.

### Clause 28

[3209] 28. The method of clause 24 for treating psoriasis, wherein the pharmaceutical composition is provided to the subject orally, topically, parenterally, intravenously, subcutaneously, peritonealy, or intravenously.

### Clause 29

[3210] 29. The peptide inhibitor or peptide inhibitor or pharmaceutically acceptable salt thereof of any one of clauses 1-21, or the pharmaceutical composition of any one of clauses 22-24, for use in the treatment of an Inflammatory Bowel Disease (IBD), ulcerative colitis, Crohn's disease, Celiac disease (nontropicalSprue), enteropathy associated with seronegative arthropathies, microscopic colitis, collagenous colitis, eosinophilic gastroenteritis, colitis associated with radio- or chemo-therapy, colitis associated with disorders of innate immunity as in leukocyte adhesion deficiency-1, chronic granulomatous disease, glycogen storage disease type 1b, Hermansky-Pudlak syndrome, Chediak-Higashi syndrome, and Wiskott-Aldrich Syndrome, pouchitis resulting after proctocolectomy and ileoanal anastomosis, gastrointestinal cancer, pancreatitis, insulin-dependent diabetes mellitus, mastitis, cholecystitis, cholangitis, pericholangitis, chronic bronchitis, chronic sinusitis, asthma, psoriasis, psoriatic arthritis, or graft versus host disease in a subject, comprising providing to the subject an effective amount of the peptide inhibitor or peptide inhibitor or pharmaceutically acceptable salt thereof of any one of clauses 1-21, or the pharmaceutical composition of any one of clauses 22-24.

### Clause 30

[3211] 30. The composition for use according to clause 29, wherein the pharmaceutical composition is provided to the subject by an oral, parenteral, intravenous, peritoneal, intradermal, subcutaneous, intramuscular, intrathecal, inhalation, vaporization, nebulization, sublingual, buccal, parenteral, rectal, intraocular, inhalation, topically, vaginal, or topical route of administration.

### Clause 31

[3212] 31. The composition for use according to clause 29 for treating Inflammatory Bowel Disease (IBD), ulcerative colitis, or Crohn's disease, wherein the pharmaceutical composition is provided to the subject orally.

### Clause 32

[3213] 32. The composition for use according to clause 29 for treating psoriasis, wherein the pharmaceutical composition is provided to the subject orally, topically, parenterally, intravenously, subcutaneously, peritonealy, or intravenously.

### Enumerated Embodiments

[3214] The present disclosure further includes the following enumerated embodiments.

### Numbered Embodiment 1

[3215] 1. A cyclic peptide, or a pharmaceutically acceptable salt or solvate thereof, comprising an amino acid sequence of Formula (A):

Z³-Z⁴-Z⁵-Z⁶-Z⁷-Z⁸-Z⁹-Z¹⁰-Z¹¹-Z¹²-Z¹³-Z¹⁴-
Z¹⁵-Z¹⁶ (A),

wherein:
[3216] the amino acid residue at position Z³ is absent or the residue of r;
[3217] the amino acid residue at position Z⁴ is the residue of an amino acid that is connected to the amino acid residue at position Z⁹;
[3218] the amino acid residue at position Z⁵ is the residue of N(N(Me)₂);
[3219] the amino acid residue at position Z⁶ is the residue of T;
[3220] the amino acid residue at position Z⁷ is the residue of 7MeW;
[3221] the amino acid residue at position Z⁸ is the residue of K(NMeAc);
[3222] the amino acid residue at position Z⁹ is the residue of an amino acid that is connected to the amino acid residue at position Z⁴;
[3223] the amino acid residue at position Z¹⁰ is the residue of TMAPF;
[3224] the amino acid residue at position Z¹¹ is the residue of 2Nal;
[3225] the amino acid residue at position Z¹² is absent or the residue of THP;
[3226] the amino acid residue at position Z¹³ is the residue of K(NMeAc);
[3227] the amino acid residue at position Z¹⁴ is the residue of N;
[3228] the amino acid residue at position Z¹⁵ is absent or the residue of 3Pya;
[3229] the amino acid residue at position Z¹⁶ is absent or the residue of Sar;
[3230] eight or fewer of the amino acid residues at positions Z³, Z⁵, Z⁶, Z⁷, Z⁸, Z¹⁰, Z¹¹, Z¹², Z¹³, Z¹⁴, Z¹⁵ and Z¹⁶, when an amino acid residue is present at the position, are independently replaced with an amino acid residue that is different from the amino acid residue recited at said position; and
[3231] at least one of the amino acid residues at positions Z³, Z⁵, Z⁶, Z⁷, Z⁸, Z¹⁰, Z¹¹, Z¹², Z¹³, Z¹⁴, Z¹⁵ and/or Z¹⁶, when an amino acid residue is present at the position, each independently comprise(s) at least one quaternary amine.

### Numbered Embodiment 2

[3232] 2. A cyclic peptide, or a pharmaceutically acceptable salt or solvate thereof, comprising an amino acid sequence of Formula (B):

Z³-Z⁴-Z⁵-Z⁶-Z⁷-Z⁸-Z⁹-Z¹⁰-Z¹¹-Z¹²-Z¹³-Z¹⁴-
Z¹⁵-Z¹⁶ (B),

wherein:
[3233] the amino acid residue at position Z³ is absent or the residue of r;
[3234] the amino acid residue at position Z⁴ is the residue of an amino acid that is connected to the amino acid residue at position Z⁹;
[3235] the amino acid residue at position Z⁵ is the residue of N(N(Me)₂);
[3236] the amino acid residue at position Z⁶ is the residue of T;
[3237] the amino acid residue at position Z⁷ is the residue of 7MeW;
[3238] the amino acid residue at position Z⁸ is the residue of K(NMeAc);
[3239] the amino acid residue at position Z⁹ is the residue of an amino acid that is connected to the amino acid residue at position Z⁴;
[3240] the amino acid residue at position Z¹⁰ is the residue of TMAPF;
[3241] the amino acid residue at position Z¹¹ is the residue of 2Nal;
[3242] the amino acid residue at position Z¹² is absent or the residue of THP;
[3243] the amino acid residue at position Z¹³ is the residue of K(NMeAc);
[3244] the amino acid residue at position Z¹⁴ is the residue of N;
[3245] the amino acid residue at position Z¹⁵ is absent or the residue of 3Pya;
[3246] the amino acid residue at position Z¹⁶ is absent or the residue of Sar;
[3247] eight or fewer of the amino acid residues at positions Z³, Z⁵, Z⁶, Z⁷, Z⁸, Z¹⁰, Z¹¹, Z¹², Z¹³, Z¹⁴, Z¹⁵ and Z¹⁶, when an amino acid residue is present at the position, are independently replaced with an amino acid residue that is different from the amino acid residue recited at said position; and
[3248] at least one of the amino acid residues at positions Z³, Z⁵, Z⁶, Z⁷, Z⁸, Z¹⁰, Z¹¹, Z¹², Z¹³, Z¹⁴, Z¹⁵ and/or Z¹⁶, when an amino acid residue is present at the position, each independently comprise(s) at least one masked amine and/or masked amide.

### Numbered Embodiment 3

[3249] 3. A cyclic peptide, or a pharmaceutically acceptable salt or solvate thereof, comprising an amino acid sequence of Formula (C):

Z³-Z⁴-Z⁵-Z⁶-Z⁷-Z⁸-Z⁹-Z¹⁰-Z¹¹-Z¹²-Z¹³-Z¹⁴-
Z¹⁵-Z¹⁶ (C),

wherein:
[3250] the amino acid residue at position Z³ is absent or the residue of r;
[3251] the amino acid residue at position Z⁴ is the residue of an amino acid that is connected to the amino acid residue at position Z⁹;
[3252] the amino acid residue at position Z⁵ is the residue of N(N(Me)₂);
[3253] the amino acid residue at position Z⁶ is the residue of T;
[3254] the amino acid residue at position Z⁷ is the residue of 7MeW;
[3255] the amino acid residue at position Z⁸ is the residue of K(NMeAc);
[3256] the amino acid residue at position Z⁹ is the residue of an amino acid that is connected to the amino acid residue at position Z⁴;
[3257] the amino acid residue at position Z¹⁰ is the residue of TMAPF;
[3258] the amino acid residue at position Z¹¹ is the residue of 2Nal;
[3259] the amino acid residue at position Z¹² is absent or the residue of THP;
[3260] the amino acid residue at position Z¹³ is the residue of K(NMeAc);
[3261] the amino acid residue at position Z¹⁴ is the residue of N;
[3262] the amino acid residue at position Z¹⁵ is absent or the residue of 3Pya;
[3263] the amino acid residue at position Z¹⁶ is absent or the residue of Sar; and
[3264] eight or fewer of the amino acid residues at positions Z³, Z⁵, Z⁶, Z⁷, Z⁸, Z°, Z¹¹, Z¹², Z¹³, Z¹⁴, Z¹⁵ and Z¹⁶, when an amino acid residue is present at the position, are independently replaced with an amino acid residue that is different from the amino acid residue recited at said position.

### Numbered Embodiment 4

[3265] 4. The cyclic peptide of any one of the preceding embodiments, wherein the amino acid residue at position Z⁴ is the residue of Abu or the residue of an amino acid comprising a sulfhydryl group.

### Numbered Embodiment 5

[3266] 5. The cyclic peptide of any one of the preceding embodiments, wherein the amino acid residue at position Z⁹ is the residue of an amino acid comprising a sulfhydryl group.

### Numbered Embodiment 6

[3267] 6. The cyclic peptide of any one of the preceding embodiments, wherein when the amino acid residue at position Z⁴ is the residue of an amino acid comprising a sulfhydryl group, the amino acid residue at position Z⁴ is connected to the amino acid residue at position Z⁹ by a disulfide bond formed between the amino acid comprising a sulfhydryl group at position Z⁴ and the amino acid comprising a sulfhydryl group at position Z⁹.

### Numbered Embodiment 7

[3268] 7. The cyclic peptide of any one of the preceding embodiments, wherein the amino acid residue at position Z⁴ is the residue of an amino acid comprising a sulfhydryl group, and the amino acid residue at position Z⁴ is connected to the amino acid residue at position Z⁹ by a disulfide bond formed between the amino acid comprising a sulfhydryl group at position Z⁴ and the amino acid comprising a sulfhydryl group at position Z⁹.

### Numbered Embodiment 8

[3269] 8. The cyclic peptide of any one of the preceding embodiments, wherein when the amino acid residue at position Z⁴ is the residue of Abu, the amino acid residue at position Z⁴ is connected to the amino acid residue at position Z⁹ by a thioether bond formed between the Abu at position Z⁴ and the amino acid comprising a sulfhydryl group at position Z⁹.

### Numbered Embodiment 9

[3270] 9. The cyclic peptide of any one of the preceding embodiments, wherein the amino acid residue at position Z⁴ is the residue of Abu, and the amino acid residue at position Z⁴ is connected to the amino acid residue at position Z⁹ by a thioether bond formed between the Abu at position Z⁴ and the amino acid comprising a sulfhydryl group at position Z⁹.

### Numbered Embodiment 10

[3271] 10. The cyclic peptide of any one of the preceding embodiments, wherein the cyclic peptide further comprises R^{NT}, wherein R^{NT} is bound to the N-terminal amine of the amino acid residue at position
[3272] (i) Z³ when Z³ is present, or
[3273] (ii) Z⁴ when Z³ is absent; and
   R^{NT} is selected from the group consisting of: —C(O)-optionally substituted (C₁-C₂₀) alkyl and —C(O)-optionally substituted (C₁-C₄₀) heteroalkyl.

### Numbered Embodiment 11

[3274] 11. The cyclic peptide of any one of the preceding embodiments, wherein the cyclic peptide further comprises R^{CT}, wherein R^{CT} is bound to the carbonyl derived from the C-terminal carboxylic acid of the amino acid residue at position
[3275] (i) Z¹⁶ when Z¹⁶ is present,
[3276] (ii) Z¹⁵ when Z¹⁶ is absent, or
[3277] (iii) Z¹⁴ when Z¹¹ and Z¹⁶ are absent; and
   R^{CT} is —N(R^{Y})(R^{Z}), wherein
[3278] (i) each R^{Y} and R^{Z} is independently selected from the group consisting of: hydrogen, optionally substituted (C₁-C₁₅) alkyl and optionally substituted (C₁-C₃₀) heteroalkyl, or
[3279] (ii) each R^{Y} and R^{Z} come together with the N atom to which they are attached to form an optionally substituted (CH₃—C₁₄) heterocyclic ring or an optionally substituted (C₅-C₁₀) bicyclic heterocyclic ring.

### Numbered Embodiment 12

[3280] 12. The cyclic peptide of any one of the preceding embodiments, wherein the cyclic peptide further comprises R^{CT}, wherein R^{CT} is bound to the carbonyl derived from the C-terminal carboxylic acid of the amino acid residue at position
[3281] (i) Z¹⁶ when Z¹⁶ is present,
[3282] (ii) Z¹⁵ when Z¹⁶ is absent, or
[3283] (iii) Z¹⁴ when Z¹⁵ and Z¹⁶ are absent; and
   R^{CT} is —N(R^{Y})(R^{Z}), wherein
[3284] (i) each R^{Y} and R^{Z} is independently selected from the group consisting of: hydrogen, optionally substituted (C₁-C₁₅) alkyl and optionally substituted (C₁-C₃₀) heteroalkyl, provided that only one of R and R^{Z} is hydrogen, or
[3285] (ii) each R^{Y} and R^{Z} come together with the N atom to which they are attached to form an optionally substituted (CH₃—C₁₄) heterocyclic ring or an optionally substituted (C₅-C₁₀) bicyclic heterocyclic ring.

### Numbered Embodiment 13

[3286] 13. The cyclic peptide of any one of the preceding embodiments, wherein the cyclic peptide further comprises R^{NT} and R^{CT} and is of Formula (D):

R^{NT}-Z³-Z⁴-Z⁵-Z⁶-Z⁷-Z⁸-Z⁹-Z¹⁰-Z¹¹-Z¹²-
Z¹³-Z¹⁴-Z¹⁵-Z¹⁶-R^{CT} (D),

[3287] wherein R^{NT}, Z³, Z⁴, Z⁵, Z⁶, Z⁷, Z⁸, Z⁹, Z¹⁰, Z¹¹, Z¹², Z¹³, Z¹⁴, Z¹⁵, Z¹⁶ and R^{CT} are as defined in any one of the preceding embodiments.

### Numbered Embodiment 14

[3288] 14. The cyclic peptide of any one of the preceding embodiments, wherein eight of the amino acid residues at positions Z³, Z⁵, Z⁶, Z⁷, Z⁸, Z¹⁰, Z¹¹, Z¹², Z¹³, Z¹⁴, Z¹⁵ and Z¹⁶, when an amino acid residue is present at the position, are independently replaced with an amino acid residue that is different from the amino acid residue recited at said position.

### Numbered Embodiment 15

[3289] 15. The cyclic peptide of any one of the preceding embodiments, wherein seven or fewer of the amino acid residues at positions Z³, Z⁵, Z⁶, Z⁷, Z⁸, Z¹⁰, Z¹¹, Z¹², Z¹³, Z¹⁴, Z¹⁵ and Z¹⁶, when an amino acid residue is present at the position, are independently replaced with an amino acid residue that is different from the amino acid residue recited at said position.

### Numbered Embodiment 16

[3290] 16. The cyclic peptide of any one of the preceding embodiments, wherein seven of the amino acid residues at positions Z³, Z⁵, Z⁶, Z⁷, Z⁸, Z¹⁰, Z¹¹, Z¹², Z¹³, Z¹⁴, Z¹⁵ and Z¹⁶, when an amino acid residue is present at the position, are independently replaced with an amino acid residue that is different from the amino acid residue recited at said position.

### Numbered Embodiment 17

[3291] 17. The cyclic peptide of any one of the preceding embodiments, wherein six or fewer of the amino acid residues at positions Z³, Z⁵, Z⁶, Z⁷, Z⁸, Z¹⁰, Z¹¹, Z¹², Z¹³, Z¹⁴, Z¹⁵ and Z¹⁶, when an amino acid residue is present at the position, are independently replaced with an amino acid residue that is different from the amino acid residue recited at said position.

### Numbered Embodiment 18

[3292] 18. The cyclic peptide of any one of the preceding embodiments, wherein six of the amino acid residues at positions Z³, Z⁵, Z⁶, Z⁷, Z⁸, Z¹⁰, Z¹¹, Z¹², Z¹³, Z¹⁴, Z¹⁵ and Z¹⁶, when an amino acid residue is present at the position, are independently replaced with an amino acid residue that is different from the amino acid residue recited at said position.

### Numbered Embodiment 19

[3293] 19. The cyclic peptide of any one of the preceding embodiments, wherein five or fewer of the amino acid residues at positions Z³, Z⁵, Z⁶, Z⁷, Z⁸, Z¹⁰, Z¹¹, Z¹², Z¹³, Z¹⁴, Z¹⁵ and Z¹⁶, when an amino acid residue is present at the position, are independently replaced with an amino acid residue that is different from the amino acid residue recited at said position.

### Numbered Embodiment 20

[3294] 20. The cyclic peptide of any one of the preceding embodiments, wherein five of the amino acid residues at positions Z³, Z⁵, Z⁶, Z⁷, Z⁸, Z¹⁰, Z¹¹, Z¹², Z¹³, Z¹⁴, Z¹⁵ and Z¹⁶, when an amino acid residue is present at the position, are independently replaced with an amino acid residue that is different from the amino acid residue recited at said position.

### Numbered Embodiment 21

[3295] 21. The cyclic peptide of any one of the preceding embodiments, wherein four or fewer of the amino acid residues at positions Z³, Z⁵, Z⁶, Z⁷, Z⁸, Z¹⁰, Z¹¹, Z¹², Z¹³, Z¹⁴, Z¹⁵ and Z¹⁶, when an amino acid residue is present at the position, are independently replaced with an amino acid residue that is different from the amino acid residue recited at said position.

### Numbered Embodiment 22

[3296] 22. The cyclic peptide of any one of the preceding embodiments, wherein four of the amino acid residues at positions Z³, Z⁵, Z⁶, Z⁷, Z⁸, Z¹⁰, Z¹¹, Z¹², Z¹³, Z¹⁴, Z¹⁵ and Z¹⁶, when an amino acid residue is present at the position, are independently replaced with an amino acid residue that is different from the amino acid residue recited at said position.

### Numbered Embodiment 23

[3297] 23. The cyclic peptide of any one of the preceding embodiments, wherein three or fewer of the amino acid residues at positions Z³, Z⁵, Z⁶, Z⁷, Z⁸, Z¹⁰, Z¹¹, Z¹², Z¹³, Z¹⁴, Z¹⁵ and Z¹⁶, when an amino acid residue is present at the position, are independently replaced with an amino acid residue that is different from the amino acid residue recited at said position.

### Numbered Embodiment 24

[3298] 24. The cyclic peptide of any one of the preceding embodiments, wherein three of the amino acid residues at positions Z³, Z⁵, Z⁶, Z⁷, Z⁸, Z¹⁰, Z¹¹, Z¹², Z¹³, Z¹⁴, Z¹⁵ and Z¹⁶, when an amino acid residue is present at the position, are independently replaced with an amino acid residue that is different from the amino acid residue recited at said position.

### Numbered Embodiment 25

[3299] 25. The cyclic peptide of any one of the preceding embodiments, wherein two or fewer of the amino acid residues at positions Z³, Z⁵, Z⁶, Z⁷, Z⁸, Z¹⁰, Z¹¹, Z¹², Z¹³, Z¹⁴, Z¹⁵ and Z¹⁶, when an amino acid residue is present at the position, are independently replaced with an amino acid residue that is different from the amino acid residue recited at said position.

### Numbered Embodiment 26

[3300] 26. The cyclic peptide of any one of the preceding embodiments, wherein two of the amino acid residues at positions Z³, Z⁵, Z⁶, Z⁷, Z⁸, Z¹⁰, Z¹¹, Z¹², Z¹³, Z¹⁴, Z¹⁵ and Z¹⁶, when an amino acid residue is present at the position, are independently replaced with an amino acid residue that is different from the amino acid residue recited at said position.

### Numbered Embodiment 27

[3301] 27. The cyclic peptide of any one of the preceding embodiments, wherein one or fewer of the amino acid residues at positions Z³, Z⁵, Z⁶, Z⁷, Z⁸, Z¹⁰, Z¹¹, Z¹², Z¹³, Z¹⁴, Z¹⁵ and Z¹⁶, when an amino acid residue is present at the position, are independently replaced with an amino acid residue that is different from the amino acid residue recited at said position.

### Numbered Embodiment 28

[3302] 28. The cyclic peptide of any one of the preceding embodiments, wherein one of the amino acid residues at positions Z³, Z⁵, Z⁶, Z⁷, Z⁸, Z¹⁰, Z¹¹, Z¹², Z¹³, Z¹⁴, Z¹⁵ and Z¹⁶, when an amino acid residue is present at the position, is independently replaced with an amino acid residue that is different from the amino acid residue recited at said position.

### Numbered Embodiment 29

[3303] 29. The cyclic peptide of any one of the preceding embodiments, wherein none of the amino acid residues at positions Z³, Z⁵, Z⁶, Z⁷, Z⁸, Z¹⁰, Z¹¹, Z¹², Z¹³, Z¹⁴, Z¹⁵ and Z¹⁶, when an amino acid residue is present at the position, are independently replaced with an amino acid residue that is different from the amino acid residue recited at said position.

### Numbered Embodiment 30

[3304] 30. The cyclic peptide of any one of the preceding embodiments, wherein seven or fewer of the amino acid residues at positions Z³, Z⁵, Z⁸, Z¹⁰, Z¹³, Z¹¹ and Z¹⁶, when an amino acid residue is present at the position, are independently replaced with an amino acid residue that is different from the amino acid residue recited at said position.

### Numbered Embodiment 31

[3305] 31. The cyclic peptide of any one of the preceding embodiments, wherein seven of the amino acid residues at positions Z³, Z⁵, Z⁸, Z¹⁰, Z¹³, Z¹⁵ and Z¹⁶, when an amino acid residue is present at the position, are independently replaced with an amino acid residue that is different from the amino acid residue recited at said position.

### Numbered Embodiment 32

[3306] 32. The cyclic peptide of any one of the preceding embodiments, wherein six or fewer of the amino acid residues at positions Z³, Z⁵, Z⁸, Z°, Z¹³, Z¹⁵ and Z¹⁶, when an amino acid residue is present at the position, are independently replaced with an amino acid residue that is different from the amino acid residue recited at said position.

### Numbered Embodiment 33

[3307] 33. The cyclic peptide of any one of the preceding embodiments, wherein six of the amino acid residues at positions Z³, Z⁵, Z⁸, Z¹⁰, Z¹³, Z¹⁵ and Z¹⁶, when an amino acid residue is present at the position, are independently replaced with an amino acid residue that is different from the amino acid residue recited at said position.

### Numbered Embodiment 34

[3308] 34. The cyclic peptide of any one of the preceding embodiments, wherein five or fewer of the amino acid residues at positions Z³, Z⁵, Z⁸, Z°, Z¹³, Z¹⁵ and Z¹⁶, when an amino acid residue is present at the position, are independently replaced with an amino acid residue that is different from the amino acid residue recited at said position.

### Numbered Embodiment 35

[3309] 35. The cyclic peptide of any one of the preceding embodiments, wherein five of the amino acid residues at positions Z³, Z⁵, Z⁸, Z¹⁰, Z¹³, Z¹⁵ and Z¹⁶, when an amino acid residue is present at the position, are independently replaced with an amino acid residue that is different from the amino acid residue recited at said position.

### Numbered Embodiment 36

[3310] 36. The cyclic peptide of any one of the preceding embodiments, wherein four or fewer of the amino acid residues at positions Z³, Z⁵, Z⁸, Z°, Z¹³, Z¹⁵ and Z¹⁶, when an amino acid residue is present at the position, are independently replaced with an amino acid residue that is different from the amino acid residue recited at said position.

### Numbered Embodiment 37

[3311] 37. The cyclic peptide of any one of the preceding embodiments, wherein four of the amino acid residues at positions Z³, Z⁵, Z⁸, Z¹⁰, Z¹³, Z¹⁵ and Z¹⁶, when an amino acid residue is present at the position, are independently replaced with an amino acid residue that is different from the amino acid residue recited at said position.

### Numbered Embodiment 38

[3312] 38. The cyclic peptide of any one of the preceding embodiments, wherein three or fewer of the amino acid residues at positions Z³, Z⁵, Z⁸, Z¹⁰, Z¹³, Z¹⁵ and Z¹⁶, when an amino acid residue is present at the position, are independently replaced with an amino acid residue that is different from the amino acid residue recited at said position.

### Numbered Embodiment 39

[3313] 39. The cyclic peptide of any one of the preceding embodiments, wherein three of the amino acid residues at positions Z³, Z⁵, Z⁸, Z¹⁰, Z¹³, Z¹⁵ and Z¹⁶, when an amino acid residue is present at the position, are independently replaced with an amino acid residue that is different from the amino acid residue recited at said position.

### Numbered Embodiment 40

[3314] 40. The cyclic peptide of any one of the preceding embodiments, wherein two or fewer of the amino acid residues at positions Z³, Z⁵, Z⁸, Z°, Z¹³, Z¹⁵ and Z¹⁶, when an amino acid residue is present at the position, are independently replaced with an amino acid residue that is different from the amino acid residue recited at said position.

### Numbered Embodiment 41

[3315] 41. The cyclic peptide of any one of the preceding embodiments, wherein two of the amino acid residues at positions Z³, Z⁵, Z⁸, Z¹⁰, Z¹³, Z¹⁵ and Z¹⁶, when an amino acid residue is present at the position, are independently replaced with an amino acid residue that is different from the amino acid residue recited at said position.

### Numbered Embodiment 42

[3316] 42. The cyclic peptide of any one of the preceding embodiments, wherein one or fewer of the amino acid residues at positions Z³, Z⁵, Z⁸, Z°, Z¹³, Z¹⁵ and Z¹⁶, when an amino acid residue is present at the position, are independently replaced with an amino acid residue that is different from the amino acid residue recited at said position.

### Numbered Embodiment 43

[3317] 43. The cyclic peptide of any one of the preceding embodiments, wherein one of the amino acid residues at positions Z³, Z⁵, Z⁸, Z¹⁰, Z¹³, Z¹⁵ and Z¹⁶, when an amino acid residue is present at the position, is independently replaced with an amino acid residue that is different from the amino acid residue recited at said position.

### Numbered Embodiment 44

[3318] 44. The cyclic peptide of any one of the preceding embodiments, wherein four or fewer of the amino acid residues at positions Z⁵, Z⁸, Z¹⁰, and Z¹³ are independently replaced with an amino acid residue that is different from the amino acid residue recited at said position.

### Numbered Embodiment 45

[3319] 45. The cyclic peptide of any one of the preceding embodiments, wherein four of the amino acid residues at positions Z⁵, Z⁸, Z¹⁰, and Z¹³ are independently replaced with an amino acid residue that is different from the amino acid residue recited at said position.

### Numbered Embodiment 46

[3320] 46. The cyclic peptide of any one of the preceding embodiments, wherein three or fewer of the amino acid residues at positions Z⁵, Z⁸, Z¹⁰, and Z¹³ are independently replaced with an amino acid residue that is different from the amino acid residue recited at said position.

### Numbered Embodiment 47

[3321] 47. The cyclic peptide of any one of the preceding embodiments, wherein three of the amino acid residues at positions Z⁵, Z⁸, Z¹⁰, and Z¹³ are independently replaced with an amino acid residue that is different from the amino acid residue recited at said position.

### Numbered Embodiment 48

[3322] 48. The cyclic peptide of any one of the preceding embodiments, wherein two or fewer of the amino acid residues at positions Z⁵, Z⁸, Z¹⁰, and Z¹³ are independently replaced with an amino acid residue that is different from the amino acid residue recited at said position.

### Numbered Embodiment 49

[3323] 49. The cyclic peptide of any one of the preceding embodiments, wherein two of the amino acid residues at positions Z⁵, Z⁸, Z¹⁰, and Z¹³ are independently replaced with an amino acid residue that is different from the amino acid residue recited at said position.

### Numbered Embodiment 50

[3324] 50. The cyclic peptide of any one of the preceding embodiments, wherein one or fewer of the amino acid residues at positions Z⁵, Z⁸, Z¹⁰, and Z¹³ are independently replaced with an amino acid residue that is different from the amino acid residue recited at said position.

### Numbered Embodiment 51

[3325] 51. The cyclic peptide of any one of the preceding embodiments, wherein one of the amino acid residues at positions Z⁵, Z⁸, Z¹⁰, and Z¹³ is independently replaced with an amino acid residue that is different from the amino acid residue recited at said position.

### Numbered Embodiment 52

[3326] 52. The cyclic peptide of any one of the preceding embodiments, wherein the amino acid residue at position Z³, when an amino acid residue is present at the position, is not replaced.

### Numbered Embodiment 53

[3327] 53. The cyclic peptide of any one of the preceding embodiments, wherein the amino acid residue at position Z⁶ is not replaced.

### Numbered Embodiment 54

[3328] 54. The cyclic peptide of any one of the preceding embodiments, wherein the amino acid residue at position Z⁷ is not replaced.

### Numbered Embodiment 55

[3329] 55. The cyclic peptide of any one of the preceding embodiments, wherein the amino acid residue at position Z¹¹ is not replaced.

### Numbered Embodiment 56

[3330] 56. The cyclic peptide of any one of the preceding embodiments, wherein the amino acid residue at position Z¹², when an amino acid residue is present at the position, is not replaced.

### Numbered Embodiment 57

[3331] 57. The cyclic peptide of any one of the preceding embodiments, wherein the amino acid residue at position Z¹⁴ is not replaced.

### Numbered Embodiment 58

[3332] 58. The cyclic peptide of any one of the preceding embodiments, wherein the amino acid residue at position Z¹⁵, when an amino acid residue is present at the position, is not replaced.

### Numbered Embodiment 59

[3333] 59. The cyclic peptide of any one of the preceding embodiments, wherein the amino acid residue at position Z¹⁶, when an amino acid residue is present at the position, is not replaced.

### Numbered Embodiment 60

[3334] 60. The cyclic peptide of any one of the preceding embodiments, wherein the amino acid residues at positions Z⁶ and Z¹¹ are not replaced.

### Numbered Embodiment 61

[3335] 61. The cyclic peptide of any one of the preceding embodiments, wherein the amino acid residues at positions Z⁶ and Z¹⁴ are not replaced.

### Numbered Embodiment 62

[3336] 62. The cyclic peptide of any one of the preceding embodiments, wherein the amino acid residues at positions Z¹¹ and Z¹⁴ are not replaced.

### Numbered Embodiment 63

[3337] 63. The cyclic peptide of any one of the preceding embodiments, wherein the amino acid residues at positions Z⁶, Z¹¹ and Z¹⁴ are not replaced.

### Numbered Embodiment 64

[3338] 64. The cyclic peptide of any one of the preceding embodiments, wherein the amino acid residues at positions Z⁶, Z⁷, Z¹¹ and Z¹⁴ are not replaced.

### Numbered Embodiment 65

[3339] 65. The cyclic peptide of any one of the preceding embodiments, wherein the amino acid residues at positions Z⁶, Z¹¹, Z¹² and Z¹⁴, when an amino acid residue is present at the position, are not replaced.

### Numbered Embodiment 66

[3340] 66. The cyclic peptide of any one of the preceding embodiments, wherein the amino acid residues at positions Z⁶, Z⁷, Z¹¹, Z¹² and Z¹⁴, when an amino acid residue is present at the position, are not replaced.

### Numbered Embodiment 67

[3341] 67. The cyclic peptide of any one of the preceding embodiments, wherein the amino acid residues at positions Z³, Z⁶, Z⁷, Z¹¹, Z¹² and Z¹⁴, when an amino acid residue is present at the position, are not replaced.

### Numbered Embodiment 68

[3342] 68. The cyclic peptide of any one of the preceding embodiments, wherein the amino acid residues at positions Z⁶, Z⁷, Z¹¹, Z¹², Z¹⁴ and Z¹⁵, when an amino acid residue is present at the position, are not replaced.

### Numbered Embodiment 69

[3343] 69. The cyclic peptide of any one of the preceding embodiments, wherein the amino acid residues at positions Z³, Z⁶, Z⁷, Z¹¹, Z¹², Z¹⁴ and Z¹⁵, when an amino acid residue is present at the position, are not replaced.

### Numbered Embodiment 70

[3344] 70. The cyclic peptide of any one of the preceding embodiments, wherein the amino acid residues at positions Z⁶, Z⁷, Z¹¹, Z¹², Z¹⁴ and Z¹⁶, when an amino acid residue is present at the position, are not replaced.

### Numbered Embodiment 71

[3345] 71. The cyclic peptide of any one of the preceding embodiments, wherein the amino acid residues at positions Z³, Z⁶, Z⁷, Z¹¹, Z¹², Z¹⁴ and Z¹⁶, when an amino acid residue is present at the position, are not replaced.

### Numbered Embodiment 72

[3346] 72. The cyclic peptide of any one of the preceding embodiments, wherein the amino acid residues at positions Z⁶, Z⁷, Z¹¹, Z¹², Z¹⁴, Z¹⁵ and Z¹⁶, when an amino acid residue is present at the position, are not replaced.

### Numbered Embodiment 73

[3347] 73. The cyclic peptide of any one of the preceding embodiments, wherein the amino acid residues at positions Z³, Z⁶, Z⁷, Z¹¹, Z¹², Z¹⁴, Z¹¹ and Z¹⁶, when an amino acid residue is present at the position, are not replaced.

### Numbered Embodiment 74

[3348] 74. The cyclic peptide of any one of the preceding embodiments, wherein three or fewer of the amino acid residues at positions Z³, Z¹², Z¹⁵ and Z¹⁶ are absent.

### Numbered Embodiment 75

[3349] 75. The cyclic peptide of any one of the preceding embodiments, wherein three of the amino acid residues at positions Z³, Z¹², Z¹⁵ and Z¹⁶ are absent.

### Numbered Embodiment 76

[3350] 76. The cyclic peptide of any one of the preceding embodiments, wherein two or fewer of the amino acid residues at positions Z³, Z¹², Z¹⁵ and Z¹⁶ are absent.

### Numbered Embodiment 77

[3351] 77. The cyclic peptide of any one of the preceding embodiments, wherein two of the amino acid residues at positions Z³, Z¹², Z¹⁵ and Z¹⁶ are absent.

### Numbered Embodiment 78

[3352] 78. The cyclic peptide of any one of the preceding embodiments, wherein one or fewer of the amino acid residues at positions Z³, Z¹², Z¹⁵ and Z¹⁶ are absent.

### Numbered Embodiment 79

[3353] 79. The cyclic peptide of any one of the preceding embodiments, wherein one of the amino acid residues at positions Z³, Z¹², Z¹⁵ and Z¹⁶ is absent.

### Numbered Embodiment 80

[3354] 80. The cyclic peptide of any one of the preceding embodiments, wherein none of the amino acid residues at positions Z³, Z¹², Z¹⁵ and Z¹⁶ are absent.

### Numbered Embodiment 81

[3355] 81. The cyclic peptide of any one of the preceding embodiments, wherein the amino acid residue at position Z³ is absent and the amino acid residues at positions Z¹², Z¹⁵ and Z¹⁶ are present.

### Numbered Embodiment 82

[3356] 82. The cyclic peptide of any one of the preceding embodiments, wherein the amino acid residue at position Z¹² is absent and the amino acid residues at positions Z³, Z¹⁵ and Z¹⁶ are present.

### Numbered Embodiment 83

[3357] 83. The cyclic peptide of any one of the preceding embodiments, wherein the amino acid residue at position Z¹⁵ is absent and the amino acid residues at positions Z³, Z¹² and Z¹⁶ are present.

### Numbered Embodiment 84

[3358] 84. The cyclic peptide of any one of the preceding embodiments, wherein the amino acid residue at position Z¹⁶ is absent and the amino acid residues at positions Z³, Z¹² and Z¹⁵ are present.

### Numbered Embodiment 85

[3359] 85. The cyclic peptide of any one of the preceding embodiments, wherein the amino acid residues at positions Z³ and Z¹⁶ are absent and the amino acid residues at positions Z¹² and Z⁵ are present.

### Numbered Embodiment 86

[3360] 86. The cyclic peptide of any one of the preceding embodiments, wherein the amino acid residues at positions Z³, Z¹⁵ and Z¹⁶ are absent and the amino acid residue at position Z¹² is present.

### Numbered Embodiment 87

[3361] 87. The cyclic peptide of any one of the preceding embodiments, wherein at least one of R^{NT}, when present, and/or R^{CT}, when present, and/or the amino acid residues at positions Z³, Z⁵, Z⁶, Z⁷, Z⁸, Z¹⁰, Z¹¹, Z¹², Z¹³, Z¹⁴, Z¹⁵ and/or Z¹⁶, when an amino acid residue is present at the position, each independently comprise(s) at least one quaternary amine.

### Numbered Embodiment 88

[3362] 88. The cyclic peptide of any one of the preceding embodiments, wherein at least one of R^{NT}, when present, and/or R^{CT}, when present, and/or the amino acid residues at positions Z³, Z⁵, Z⁶, Z⁷, Z⁸, Z¹⁰, Z¹¹, Z¹², Z¹³, Z¹⁴, Z¹⁵ and/or Z¹⁶, when an amino acid residue is present at the position, each independently comprise(s) a quaternary amine.

### Numbered Embodiment 89

[3363] 89. The cyclic peptide of any one of the preceding embodiments, wherein at least one of the amino acid residues at positions Z³, Z⁵, Z⁶, Z⁷, Z⁸, Z¹⁰, Z¹¹, Z¹², Z¹³, Z¹⁴, Z¹¹ and/or Z¹⁶, when an amino acid residue is present at the position, each independently comprise(s) at least one quaternary amine.

### Numbered Embodiment 90

[3364] 90. The cyclic peptide of any one of the preceding embodiments, wherein at least one of the amino acid residues at positions Z³, Z⁵, Z⁶, Z⁷, Z⁸, Z¹⁰, Z¹¹, Z¹², Z¹³, Z¹⁴, Z¹¹ and/or Z¹⁶, when an amino acid residue is present at the position, each independently comprise(s) a quaternary amine.

### Numbered Embodiment 91

[3365] 91. The cyclic peptide of any one of the preceding embodiments, wherein at least one of R^{NT}, when present, and/or R^{CT}, when present, and/or the amino acid residues at positions Z³, Z⁵, Z⁸, Z¹⁰, Z¹² and/or Z¹³, when an amino acid residue is present at the position, each independently comprise(s) at least one quaternary amine.

### Numbered Embodiment 92

[3366] 92. The cyclic peptide of any one of the preceding embodiments, wherein at least one of R^{NT}, when present, and/or R^{CT}, when present, and/or the amino acid residues at positions Z³, Z⁵, Z⁸, Z¹⁰, Z¹², and/or Z¹³, when an amino acid residue is present at the position, each independently comprise(s) a quaternary amine.

### Numbered Embodiment 93

[3367] 93. The cyclic peptide of any one of the preceding embodiments, wherein at least one of R^{NT}, when present, and/or the amino acid residues at positions Z³, Z⁵, Z⁸, Z¹⁰, and/or Z¹³, when an amino acid residue is present at the position, each independently comprise(s) at least one quaternary amine.

### Numbered Embodiment 94

[3368] 94. The cyclic peptide of any one of the preceding embodiments, wherein at least one of R^{NT}, when present, and/or the amino acid residues at positions Z³, Z⁵, Z⁸, Z¹⁰, and/or Z¹³, when an amino acid residue is present at the position, each independently comprise(s) a quaternary amine.

### Numbered Embodiment 95

[3369] 95. The cyclic peptide of any one of the preceding embodiments, wherein R^{NT} and the amino acid residues at positions Z⁵ and Z¹⁰ each independently comprise at least one quaternary amine.

### Numbered Embodiment 96

[3370] 96. The cyclic peptide of any one of the preceding embodiments, wherein R^{NT} and the amino acid residues at positions Z⁵ and Z¹⁰ each independently comprise a quaternary amine.

### Numbered Embodiment 97

[3371] 97. The cyclic peptide of any one of the preceding embodiments, wherein R^{NT} and the amino acid residues at positions Z⁸ and Z¹⁰ each independently comprise at least one quaternary amine.

### Numbered Embodiment 98

[3372] 98. The cyclic peptide of any one of the preceding embodiments, wherein R^{NT} and the amino acid residues at positions Z⁸ and Z¹⁰ each independently comprise a quaternary amine.

### Numbered Embodiment 99

[3373] 99. The cyclic peptide of any one of the preceding embodiments, wherein R^{NT} and the amino acid residues at positions Z⁸ and Z¹³ each independently comprise at least one quaternary amine.

### Numbered Embodiment 100

[3374] 100. The cyclic peptide of any one of the preceding embodiments, wherein R^{NT} and the amino acid residues at positions Z⁸ and Z¹³ each independently comprise a quaternary amine.

### Numbered Embodiment 101

[3375] 101. The cyclic peptide of any one of the preceding embodiments, wherein the amino acid residues at positions Z⁸, Z¹⁰ and Z¹³ each independently comprise at least one quaternary amine.

### Numbered Embodiment 102

[3376] 102. The cyclic peptide of any one of the preceding embodiments, wherein the amino acid residues at positions Z⁸, Z¹⁰ and Z¹³ each independently comprise a quaternary amine.

### Numbered Embodiment 103

[3377] 103. The cyclic peptide of any one of the preceding embodiments, wherein R^{NT} and the amino acid residue at position Z³ each independently comprise at least one quaternary amine.

### Numbered Embodiment 104

[3378] 104. The cyclic peptide of any one of the preceding embodiments, wherein R^{NT} and the amino acid residue at position Z³ each independently comprise a quaternary amine.

### Numbered Embodiment 105

[3379] 105. The cyclic peptide of any one of the preceding embodiments, wherein R^{NT} and R^{CT}each independently comprise at least one quaternary amine.

### Numbered Embodiment 106

[3380] 106. The cyclic peptide of any one of the preceding embodiments, wherein R^{NT} and R^{CT}each comprise a quaternary amine.

### Numbered Embodiment 107

[3381] 107. The cyclic peptide of any one of the preceding embodiments, wherein R^{NT} and the amino acid residue at position Z⁸ each independently comprise at least one quaternary amine.

### Numbered Embodiment 108

[3382] 108. The cyclic peptide of any one of the preceding embodiments, wherein R^{NT} and the amino acid residue at position Z⁸ each independently comprise a quaternary amine.

### Numbered Embodiment 109

[3383] 109. The cyclic peptide of any one of the preceding embodiments, wherein R^{NT} and the amino acid residue at position Z¹⁰ each independently comprise at least one quaternary amine.

### Numbered Embodiment 110

[3384] 110. The cyclic peptide of any one of the preceding embodiments, wherein R^{NT} and the amino acid residue at position Z¹⁰ each independently comprise a quaternary amine.

### Numbered Embodiment 111

[3385] 111. The cyclic peptide of any one of the preceding embodiments, wherein the amino acid residues at positions Z³ and Z⁸ each independently comprise at least one quaternary amine.

### Numbered Embodiment 112

[3386] 112. The cyclic peptide of any one of the preceding embodiments, wherein the amino acid residues at positions Z³ and Z⁸ each independently comprise a quaternary amine.

### Numbered Embodiment 113

[3387] 113. The cyclic peptide of any one of the preceding embodiments, wherein the amino acid residues at positions Z³ and Z¹⁰ each independently comprise at least one quaternary amine.

### Numbered Embodiment 114

[3388] 114. The cyclic peptide of any one of the preceding embodiments, wherein the amino acid residues at positions Z³ and Z¹⁰ each independently comprise a quaternary amine.

### Numbered Embodiment 115

[3389] 115. The cyclic peptide of any one of the preceding embodiments, wherein the amino acid residues at positions Z⁵ and Z¹⁰ each independently comprise at least one quaternary amine.

### Numbered Embodiment 116

[3390] 116. The cyclic peptide of any one of the preceding embodiments, wherein the amino acid residues at positions Z⁵ and Z¹⁰ each independently comprise a quaternary amine.

### Numbered Embodiment 117

[3391] 117. The cyclic peptide of any one of the preceding embodiments, wherein the amino acid residues at positions Z⁸ and Z¹⁰ each independently comprise at least one quaternary amine.

### Numbered Embodiment 118

[3392] 118. The cyclic peptide of any one of the preceding embodiments, wherein the amino acid residues at positions Z⁸ and Z¹⁰ each independently comprise a quaternary amine.

### Numbered Embodiment 119

[3393] 119. The cyclic peptide of any one of the preceding embodiments, wherein the amino acid residues at positions Z⁸ and Z¹³ each independently comprise at least one quaternary amine.

### Numbered Embodiment 120

[3394] 120. The cyclic peptide of any one of the preceding embodiments, wherein the amino acid residues at positions Z⁸ and Z¹³ each independently comprise a quaternary amine.

### Numbered Embodiment 121

[3395] 121. The cyclic peptide of any one of the preceding embodiments, wherein the amino acid residues at positions Z¹⁰ and Z¹³ each independently comprise at least one quaternary amine.

### Numbered Embodiment 122

[3396] 122. The cyclic peptide of any one of the preceding embodiments, wherein the amino acid residues at positions Z¹⁰ and Z¹³ each independently comprise a quaternary amine.

### Numbered Embodiment 123

[3397] 123. The cyclic peptide of any one of the preceding embodiments, wherein R^{NT} comprises at least one quaternary amine.

### Numbered Embodiment 124

[3398] 124. The cyclic peptide of any one of the preceding embodiments, wherein R^{NT} comprises a quaternary amine.

### Numbered Embodiment 125

[3399] 125. The cyclic peptide of any one of the preceding embodiments, wherein R^{CT} comprises at least one quaternary amine.

### Numbered Embodiment 126

[3400] 126. The cyclic peptide of any one of the preceding embodiments, wherein R^{CT} comprises a quaternary amine.

### Numbered Embodiment 127

[3401] 127. The cyclic peptide of any one of the preceding embodiments, wherein the amino acid residue at position Z³ comprises at least one quaternary amine.

### Numbered Embodiment 128

[3402] 128. The cyclic peptide of any one of the preceding embodiments, wherein the amino acid residue at position Z³ comprises a quaternary amine.

### Numbered Embodiment 129

[3403] 129. The cyclic peptide of any one of the preceding embodiments, wherein the amino acid residue at position Z⁵ comprises at least one quaternary amine.

### Numbered Embodiment 130

[3404] 130. The cyclic peptide of any one of the preceding embodiments, wherein the amino acid residue at position Z⁵ comprises a quaternary amine.

### Numbered Embodiment 131

[3405] 131. The cyclic peptide of any one of the preceding embodiments, wherein the amino acid residue at position Z⁸ comprises at least one quaternary amine.

### Numbered Embodiment 132

[3406] 132. The cyclic peptide of any one of the preceding embodiments, wherein the amino acid residue at position Z⁸ comprises a quaternary amine.

### Numbered Embodiment 133

[3407] 133. The cyclic peptide of any one of the preceding embodiments, wherein the amino acid residue at position Z¹⁰ comprises at least one quaternary amine.

### Numbered Embodiment 134

[3408] 134. The cyclic peptide of any one of the preceding embodiments, wherein the amino acid residue at position Z¹⁰ comprises a quaternary amine.

### Numbered Embodiment 135

[3409] 135. The cyclic peptide of any one of the preceding embodiments, wherein the amino acid residue at position Z¹² comprises at least one quaternary amine.

### Numbered Embodiment 136

[3410] 136. The cyclic peptide of any one of the preceding embodiments, wherein the amino acid residue at position Z¹² comprises a quaternary amine.

### Numbered Embodiment 137

[3411] 137. The cyclic peptide of any one of the preceding embodiments, wherein the amino acid residue at position Z¹³ comprises at least one quaternary amine.

### Numbered Embodiment 138

[3412] 138. The cyclic peptide of any one of the preceding embodiments, wherein the amino acid residue at position Z¹³ comprises a quaternary amine.

### Numbered Embodiment 139

[3413] 139. The cyclic peptide of any one of the preceding embodiments, wherein the at least one quaternary amine is one or two quaternary amines.

### Numbered Embodiment 140

[3414] 140. The cyclic peptide of any one of the preceding embodiments, wherein each quaternary amine is independently selected from the group consisting of:

[chemical structure]

wherein each R^{ZA} is independently selected from the group consisting of: optionally substituted (C₁-C₂₀) alkyl and optionally substituted (C₁-C₂₀) heteroalkyl;

[chemical structure]

wherein each R^{ZA} and R^{ZB} is independently selected from the group consisting of: optionally substituted (C₁-C₂₀) alkyl and optionally substituted (C₁-C₂₀) heteroalkyl;

[chemical structure]

wherein
[3415] (c)(i) each R^{Z}A, R^{ZB} and R^{ZC} is independently selected from the group consisting of: optionally substituted (C₁-C₂₀) alkyl and optionally substituted (C₁-C₂₀) heteroalkyl,
[3416] (c)(ii) each R^{ZA} is independently selected from the group consisting of: optionally substituted (C₁-C₂₀) alkyl and optionally substituted (C₁-C₂₀) heteroalkyl, and each R^{ZB} and R^{ZC} come together with the N atom to which they are attached to form an optionally substituted (CH₃—C₁₄) heterocyclic ring, or
[3417] (c)(iii) each R^{Z}A, R^{ZB} and R^{ZC} come together with the N atom to which they are attached to form an optionally substituted (C₅-C₁₀) bicyclic heterocyclic ring;

[chemical structure]

wherein
[3418] (d)(i) each R^{ZA} and R^{ZB} is independently selected from the group consisting of: optionally substituted (C₁-C₂₀) alkyl and optionally substituted (C₁-C₂₀) heteroalkyl, and each R^{ZC} and R^{ZD} come together with the N atom to which they are attached to form an optionally substituted (CH₃—C₁₄) heterocyclyl, or
[3419] (d)(ii) each R^{ZA} and R^{ZB} come together with the N atom to which they are attached to form an optionally substituted (CH₃—C₁₄) heterocyclyl, and each R^{ZC} and R^{ZD} come together with the N atom to which they are attached to form an optionally substituted (CH₃—C₁₄) heterocyclyl, or
[3420] (d)(iii) each R^{ZA} and R^{ZB} come together with the N atom to which they are attached to form an optionally substituted (CH₃—C₁₄) heterocyclyl, and each R^{ZC} and R^{ZD} come together with the N atom to which they are attached to form an optionally substituted (CH₃—C₁₄) heterocyclic ring;

[chemical structure]

wherein each R^{ZA} and R^{ZB} come together with the N atom to which they are attached to form an optionally substituted (C₅-C₁₄) heteroaromatic ring, and

[chemical structure]

wherein each R^{ZA} is independently selected from the group consisting of: optionally substituted (C₁-C₂₀) alkyl and optionally substituted (C₁-C₂₀) heteroalkyl, and each R^{ZB} and R^{ZC} come together with the N atom to which they are attached to form an optionally substituted (C₅-C₁₄) heteroaryl.

### Numbered Embodiment 141

[3421] 141. The cyclic peptide of any one of the preceding embodiments, wherein each quaternary amine is independently selected from the group consisting of:

[chemical structure]

wherein each R^{ZA} is independently selected from the group consisting of: optionally substituted (C₁-C₁₆) alkyl and optionally substituted (C₁-C₈) heteroalkyl;

[chemical structure]

wherein each R^{ZA} and R^{ZB} is independently selected from the group consisting of: optionally substituted (C₁-C₁₆) alkyl and optionally substituted (C₁-C₈) heteroalkyl;

[chemical structure]

[3422] (c)(i) each R^{ZA}, R^{ZB} and R^{ZC} is independently selected from the group consisting of: optionally substituted (C₁-C₁₆) alkyl and optionally substituted (C₁-C₈) heteroalkyl,
[3423] (c)(ii) each R^{ZA} is independently selected from the group consisting of: optionally substituted (C₁-C₁₆) alkyl and optionally substituted (C₁-C₈) heteroalkyl, and each R^{ZB} and R^{ZC} come together with the N atom to which they are attached to form an optionally substituted (C₆) heterocyclic ring, or
[3424] (c)(iii) each R^{ZA}, R^{ZB} and R^{ZC} come together with the N atom to which they are attached to form an optionally substituted (C₈) bicyclic heterocyclic ring;

[chemical structure]

wherein
[3425] (d)(i) each R^{ZA} and R^{ZB} is independently selected from the group consisting of: optionally substituted (C₁-C₁₆) alkyl and optionally substituted (C₁-C₈) heteroalkyl, and each R^{ZC} and R^{ZD} come together with the N atom to which they are attached to form an optionally substituted (C₆) heterocyclyl, or
[3426] (d)(ii) each R^{ZA} and R^{ZB} come together with the N atom to which they are attached to form an optionally substituted (C₆) heterocyclyl, and each R^{ZC} and R^{ZD}come together with the N atom to which they are attached to form an optionally substituted (C₆) heterocyclyl, or
[3427] (d)(iii) each R^{ZA} and R^{ZB} come together with the N atom to which they are attached to form an optionally substituted (C₆) heterocyclyl, and each R^{ZC} and R^{ZD}come together with the N atom to which they are attached to form an optionally substituted (C₆) heterocyclic ring;

[chemical structure]

wherein each R^{ZA} and R^{ZB} come together with the N atom to which they are attached to form an optionally substituted (C₆) heteroaromatic ring; and

[chemical structure]

wherein each R^{ZA} is independently selected from the group consisting of: optionally substituted (C₁-C₁₆) alkyl and optionally substituted (C₁-C₈) heteroalkyl, and each R^{ZB} and R^{ZC} come together with the N atom to which they are attached to form an optionally substituted (C₆) heteroaryl.

### Numbered Embodiment 142

[3428] 142. The cyclic peptide of any one of the preceding embodiments, wherein each quaternary amine is independently selected from the group consisting of:

[chemical structure]

wherein each R^{ZA} is independently selected from the group consisting of: optionally substituted (C₁-C₁₆) alkyl and optionally substituted (C₁-C₈) heteroalkyl;

[chemical structure]

wherein each R^{ZA} and R^{ZB} is independently selected from the group consisting of: optionally substituted (C₁-C₁₆) alkyl and optionally substituted (C₁-C₈) heteroalkyl;

[chemical structure]

wherein
[3429] (c)(i) each R^{ZA}, R^{ZB} and R^{ZC} is independently selected from the group consisting of: optionally substituted (C₁-C₁₆) alkyl and optionally substituted (C₁-C₈) heteroalkyl,
[3430] (c)(ii) each R^{ZA} is independently selected from the group consisting of: optionally substituted (C₁-C₃) alkyl and optionally substituted (C₁-C₃) heteroalkyl, and each R^{ZB} and R^{ZC} come together with the N atom to which they are attached to form an optionally substituted (C₆) heterocyclic ring, or
[3431] (c)(iii) each R^{ZA}, R^{ZB} and R^{ZC} come together with the N atom to which they are attached to form an optionally substituted (C₈) bicyclic heterocyclic ring;

[chemical structure]

wherein
[3432] (d)(i) each R^{ZA} and R^{ZB} is independently selected from the group consisting of: optionally substituted (C₁-C₃) alkyl and optionally substituted (C₁-C₃) heteroalkyl, and each R^{ZC} and R^{ZD} come together with the N atom to which they are attached to form an optionally substituted (C₆) heterocyclyl, or
[3433] (d)(ii) each R^{ZA} and R^{ZB} come together with the N atom to which they are attached to form an optionally substituted (C₆) heterocyclyl, and each R^{ZC} and R^{ZD}come together with the N atom to which they are attached to form an optionally substituted (C₆) heterocyclyl, or
[3434] (d)(iii) each R^{ZA} and R^{ZB} come together with the N atom to which they are attached to form an optionally substituted (C₆) heterocyclyl, and each R^{ZC} and R^{ZD}come together with the N atom to which they are attached to form an optionally substituted (C₆) heterocyclic ring;

[chemical structure]

wherein each R^{ZA} and R^{ZB} come together with the N atom to which they are attached to form an optionally substituted (C₆) heteroaromatic ring; and

[chemical structure]

wherein each R^{ZA} is independently selected from the group consisting of: optionally substituted (C₁-C₃) alkyl and optionally substituted (C₁-C₃) heteroalkyl, and each R^{ZB} and R^{ZC} come together with the N atom to which they are attached to form an optionally substituted (C) heteroaryl.

### Numbered Embodiment 143

[3435] 143. The cyclic peptide of any one of the preceding embodiments, wherein when each R^{ZA}R^{ZB} and/or R^{ZC}, when present, is/are an optionally substituted alkyl, each optionally substituted alkyl is unsubstituted.

### Numbered Embodiment 144

[3436] 144. The cyclic peptide of any one of the preceding embodiments, wherein when each R^{ZA}R^{ZB} and/or R^{ZC}, when present, is/are an optionally substituted heteroalkyl, each optionally substituted heteroalkyl is unsubstituted.

### Numbered Embodiment 145

[3437] 145. The cyclic peptide of any one of the preceding embodiments, wherein when each R^{ZB} and R^{ZC} come together with the N atom to which they are attached to form an optionally substituted heterocyclic ring, the optionally substituted heterocyclic ring is unsubstituted or substituted with one or more substitutents independently selected from the group consisting of Fluoro and (C₁-C₃) alkyl.

### Numbered Embodiment 146

[3438] 146. The cyclic peptide of any one of the preceding embodiments, wherein when each R^{ZA}R^{ZB} and R^{ZC} come together with the N atom to which they are attached to form an optionally substituted bicyclic heterocyclic ring, the optionally substituted bicyclic heterocyclic ring is unsubstituted.

### Numbered Embodiment 147

[3439] 147. The cyclic peptide of any one of the preceding embodiments, wherein when each R^{ZA} and R^{ZB} come together with the N atom to which they are attached to form an optionally substituted heterocyclyl, the optionally substituted heterocyclyl is unsubstituted.

### Numbered Embodiment 148

[3440] 148. The cyclic peptide of any one of the preceding embodiments, wherein when each R^{ZB} and R^{ZC} come together with the N atom to which they are attached to form an optionally substituted heteroaryl, the optionally substituted heteroaryl is unsubstituted.

### Numbered Embodiment 149

[3441] 149. The cyclic peptide of any one of the preceding embodiments, wherein when each R^{ZC} and R^{ZD} come together with the N atom to which they are attached to form an optionally substituted heterocyclyl, the optionally substituted heterocyclyl is unsubstituted.

### Numbered Embodiment 150

[3442] 150. The cyclic peptide of any one of the preceding embodiments, wherein when each R^{ZC} and R^{ZD} come together with the N atom to which they are attached to form an optionally substituted heterocyclic ring, the optionally substituted heterocyclic ring is unsubstituted.

### Numbered Embodiment 151

[3443] 151. The cyclic peptide of any one of the preceding embodiments, wherein when each R^{ZA} and R^{ZB} come together with the N atom to which they are attached to form an optionally substituted heteroaromatic ring, the optionally substituted heteroaromatic ring is unsubstituted.

### Numbered Embodiment 152

[3444] 152. The cyclic peptide of any one of the preceding embodiments, wherein each quaternary amine is independently selected from the group consisting of:

[chemical structure]

[chemical structure]

### Numbered Embodiment 153

[3445] 153. The cyclic peptide of any one of the preceding embodiments, wherein each quaternary amine has an AN⁻counterion that is the same for each quaternary amine and is selected from the group consisting of: acetate, adipate, benzoate, benzenesulfonate, citrate, decanoate, chloride, lactate, maleate, methanesulfonate, oxalate, pivalate, propionate, succinate, sulfate, tartrate, or trifluoroacetate.

### Numbered Embodiment 154

[3446] 154. The cyclic peptide of any one of the preceding embodiments, wherein at least one of the amino acid residues at positions Z³, Z⁵, Z⁶, Z⁷, Z⁸, Z¹⁰, Z¹¹, Z¹², Z¹³, Z¹⁴, Z¹⁵ and/or Z¹⁶, when an amino acid residue is present at the position, each independently comprise(s) at least one masked amine and/or masked amide.

### Numbered Embodiment 155

[3447] 155. The cyclic peptide of any one of the preceding embodiments, wherein at least one of the amino acid residues at positions Z³, Z⁵, Z⁶, Z, Z⁸° Z¹⁰, Z¹¹, Z¹², Z¹³, Z¹⁴, Z¹⁵ and/or Z¹⁶, when an amino acid residue is present at the position, each independently comprise(s) a masked amine and/or masked amide.

### Numbered Embodiment 156

[3448] 156. The cyclic peptide of any one of the preceding embodiments, wherein at least one of the amino acid residues at positions Z⁵, Z⁷, Z⁸, Z¹⁰, Z¹³, Z¹⁴, Z¹⁵ and/or Z¹⁶, when an amino acid residue is present at the position, each independently comprise(s) at least one masked amine and/or masked amide.

### Numbered Embodiment 157

[3449] 157. The cyclic peptide of any one of the preceding embodiments, wherein at least one of the amino acid residues at positions Z⁵, Z⁷, Z⁸, Z¹⁰, Z¹³, Z¹⁴, Z¹⁵ and/or Z¹⁶, when an amino acid residue is present at the position, each independently comprise(s) a masked amine and/or masked amide.

### Numbered Embodiment 158

[3450] 158. The cyclic peptide of any one of the preceding embodiments, wherein at least one of the amino acid residues at positions Z⁵, Z⁸, and/or Z¹³, each independently comprise(s) at least one masked amine and/or masked amide.

### Numbered Embodiment 159

[3451] 159. The cyclic peptide of any one of the preceding embodiments, wherein at least one of the amino acid residues at positions Z⁵, Z⁸, and/or Z¹³, each independently comprise(s) a masked amine and/or masked amide.

### Numbered Embodiment 160

[3452] 160. The cyclic peptide of any one of the preceding embodiments, wherein the amino acid residue at position Z⁵ comprises at least one masked amine and/or masked amide.

### Numbered Embodiment 161

[3453] 161. The cyclic peptide of any one of the preceding embodiments, wherein the amino acid residue at position Z⁵ comprises a masked amine and/or masked amide.

### Numbered Embodiment 162

[3454] 162. The cyclic peptide of any one of the preceding embodiments, wherein the amino acid residue at position Z⁸ comprises at least one masked amine and/or masked amide.

### Numbered Embodiment 163

[3455] 163. The cyclic peptide of any one of the preceding embodiments, wherein the amino acid residue at position Z⁸ comprises a masked amine and/or masked amide.

### Numbered Embodiment 164

[3456] 164. The cyclic peptide of any one of the preceding embodiments, wherein the amino acid residue at position Z¹³ comprises at least one masked amine and/or masked amide.

### Numbered Embodiment 165

[3457] 165. The cyclic peptide of any one of the preceding embodiments, wherein the amino acid residue at position Z¹³ comprises a masked amine and/or masked amide.

### Numbered Embodiment 166

[3458] 166. The cyclic peptide of any one of the preceding embodiments, wherein at least one of the masked amine(s) is an amine in a backbone amide, wherein each amine in a backbone amide is independently substituted with (C₁-C₃) alkyl.

### Numbered Embodiment 167

[3459] 167. The cyclic peptide of any one of the preceding embodiments, wherein at least one of the masked amine(s) and/or masked amide is present in the side chain of the amino acid residue comprising said masked amine and/or masked amide.

### Numbered Embodiment 168

[3460] 168. The cyclic peptide of any one of the preceding embodiments, wherein at least one of the masked amine(s) and/or masked amide(s) is independently selected from the group consisting of:

[chemical structure]

wherein each R^{YA} is independently selected from the group consisting of: optionally substituted (C₁-C₁₀) alkyl and optionally substituted (C₁-C₂₀) heteroalkyl, and each R^{YB} is independently selected from the group consisting of: hydrogen, optionally substituted (C₁-C₁₀) alkyl and optionally substituted (C₁-C₂₀) heteroalkyl;

[chemical structure]

wherein each R^{YC} is independently selected from the group consisting of: optionally substituted (C₁-C₁₀) alkyl and optionally substituted (C₁-C₂₀) heteroalkyl, and each R^{YD} is independently selected from the group consisting of: hydrogen, optionally substituted (C₁-C₁₀) alkyl and optionally substituted (C₁-C₂₀) heteroalkyl;

[chemical structure]

wherein each R^{YE} is independently selected from the group consisting of: optionally substituted (C₁-C₁₀) alkyl and optionally substituted (C₁-C₂₀) heteroalkyl, and each R^{YF} is independently selected from the group consisting of: hydrogen, optionally substituted (C₁-C₁₀) alkyl and optionally substituted (C₁-C₂₀) heteroalkyl; and

[chemical structure]

wherein each R^{YG} and R^{YH} is independently selected from the group consisting of: optionally substituted (C₁-C₁₀) alkyl and optionally substituted (C₁-C₂₀) heteroalkyl.

### Numbered Embodiment 169

[3461] 169. The cyclic peptide of any one of the preceding embodiments, wherein at least one of the masked amine(s) and/or masked amide(s) is independently selected from the group consisting of:

[chemical structure]

wherein each R^{YA} is independently selected from the group consisting of: optionally substituted (C₁-C₅) alkyl and optionally substituted (C₁-C₁₅) heteroalkyl, and each R^{YB} is independently selected from the group consisting of: hydrogen, optionally substituted (C₁-C₅) alkyl and optionally substituted (C₁-C₁₅) heteroalkyl;

[chemical structure]

wherein each R^{YC} is independently selected from the group consisting of: optionally substituted (C₁-C₅) alkyl and optionally substituted (C₁-C₁₅) heteroalkyl, and each R^{YD} is independently selected from the group consisting of: hydrogen, optionally substituted (C₁-C₅) alkyl and optionally substituted (C₁-C₁₅) heteroalkyl;

[chemical structure]

wherein each R^{YE} is independently selected from the group consisting of: optionally substituted (C₁-C₅) alkyl and optionally substituted (C₁-C₁₅) heteroalkyl, and each R^{YF} is independently selected from the group consisting of: hydrogen, optionally substituted (C₁-C₅) alkyl and optionally substituted (C₁-C₁₅) heteroalkyl; and

[chemical structure]

wherein each R^{YG} and R^{YH} is independently selected from the group consisting of: optionally substituted (C₁-C₅) alkyl and optionally substituted (C₁-C₁₅) heteroalkyl.

### Numbered Embodiment 170

[3462] 170. The cyclic peptide of any one of the preceding embodiments, wherein when each R^{YA}R^{YB}, R^{Y}C, R^{Y}D, R^{YE}, R^{YF}, R^{YG} and/or R^{YH} is optionally substituted alkyl, each optionally substituted alkyl is independently unsubstituted or substituted with one or more substitutents independently selected from the group consisting of: —CO₂H and a quaternary amine of any one of the preceding embodiments, for example, —N⁺(CH₃)₃.

### Numbered Embodiment 171

[3463] 171. The cyclic peptide of any one of the preceding embodiments, wherein when each R^{YA}R^{YB}, R^{Y}C, R^{Y}D, R^{YE}, R^{YF}, R^{YG} and/or R^{YH} is optionally substituted heteroalkyl, each optionally substituted heteroalkyl is independently unsubstituted or substituted with one or more substitutents independently selected from the group consisting of: —CO₂H and a quaternary amine of any one of the preceding embodiments, for example, —N⁺(CH₃)₃.

### Numbered Embodiment 172

[3464] 172. The cyclic peptide of any one of the preceding embodiments, wherein at least one of the masked amine(s) and/or masked amide(s) is independently selected from the group consisting of:

[chemical structure]

[chemical structure]

### Numbered Embodiment 173

[3465] 173. The cyclic peptide of any one of the preceding embodiments, wherein the at least one amino acid residue(s) each independently comprising at least one masked amine and/or masked amide is/are independently selected from the group consisting of: NMe7MeW, AAMPhe, Paf(Ac), AEF(Ac), AcAEF, AEF(AcCh), AEF(Me)2, AEF(N(Me)2), AEF(MePrpa), AEF(NMe), Dab(NMeAc), Dab(NMecarn), Dab(NMeCOmPEG6), Dab(NMecPEG2a), Dab(NMecPEG3a), Dab(NMecPEG5a), Dab(NMecPEG5aCO)-, Dap(Ac), Dap(NMeAc), K(Ac), K(NMeAc), K(NMeCOmPEG6), K(NMeCOPEG4N+Me3), K(NMeCOPEG5a), K(NMecPEG5a), K(NMePEG5a), K(NMePEG3a), K(NmPEG6Ac), NMe3Pya, NMebAla, NMeDTyr, N(N(Me)), N(NMe), N(N(Me)2), Q(N(Me)2), Q(NHtBu) and Tetrazole(NMe).

### Numbered Embodiment 174

[3466] 174. The cyclic peptide of any one of the preceding embodiments, wherein when the amino acid residue at position Z³ is replaced with an amino acid residue that is different from the amino acid residue recited at said position, the amino acid residue at position Z³ is replaced with an amino acid residue selected from the group consisting of: APEG2ser, APEG2Ser, APEG2Ser(S*), e(c), e(C), hk(Me)₃, k(5cpa), k(cPEG3a), k(d), k(D), k(dPEG12Ac), k(dPEG6Ac), k(dPEG9Ac), k(Me)₃, K(Me)₃, k(PEG2PEG2gEC12), k(PEG2PEG2gEC14), k(PEG2PEG2PEG2PEG2gEC12), k(PEG2PEG6gEC12), SP6, APEG2Ser(RS), gPEG2Ser and k(PEG2PEG2gE(c)C₁₂.

### Numbered Embodiment 175

[3467] 175. The cyclic peptide of any one of the preceding embodiments, wherein when the amino acid residue at position Z³ is replaced with an amino acid residue that is different from the amino acid residue recited at said position, the amino acid residue at position Z³ is replaced with an amino acid residue comprising at least one quaternary amine selected from the group consisting of: APEG2ser, APEG2Ser, e(c), e(C), hk(Me)₃, k(5cpa), k(cPEG3a), k(d), k(D), K(Me)₃ and k(Me)₃.

### Numbered Embodiment 176

[3468] 176. The cyclic peptide of any one of the preceding embodiments, wherein when the amino acid residue at position Z³ is replaced with an amino acid residue that is different from the amino acid residue recited at said position, the amino acid residue at position Z³ is replaced with an amino acid residue that is r substituted on the side chain with one or more groups selected from: —OH, —(C₁-C₄) alkyl, —O(C₁-C₄) alkyl, and —CN.

### Numbered Embodiment 177

[3469] 177. The cyclic peptide of any one of the preceding embodiments, wherein when the amino acid residue at position Z³ is replaced with an amino acid residue that is different from the amino acid residue recited at said position, the amino acid residue at position Z³ is replaced with a hydrophilic amino acid residue.

### Numbered Embodiment 178

[3470] 178. The cyclic peptide of any one of the preceding embodiments, wherein when the amino acid residue at position Z³ is replaced with an amino acid residue that is different from the amino acid residue recited at said position, the amino acid residue at position Z³ is replaced with a basic amino acid residue.

### Numbered Embodiment 179

[3471] 179. The cyclic peptide of any one of the preceding embodiments, wherein when the amino acid residue at position Z³ is replaced with an amino acid residue that is different from the amino acid residue recited at said position, the amino acid residue at position Z³ is replaced with an acidic amino acid residue.

### Numbered Embodiment 180

[3472] 180. The cyclic peptide of any one of the preceding embodiments, wherein the amino acid residue at position Z³ is replaced with an amino acid residue that is different from the amino acid residue recited at said position.

### Numbered Embodiment 181

[3473] 181. The cyclic peptide of any one of the preceding embodiments, wherein the amino acid residue at position Z⁴ is the residue of Abu or the residue of an amino acid comprising a sulfhydryl group selected from the group consisting of: Pen, C or aMeC.

### Numbered Embodiment 182

[3474] 182. The cyclic peptide of any one of the preceding embodiments, wherein the amino acid residue at position Z⁴ is the residue of Pen.

### Numbered Embodiment 183

[3475] 183. The cyclic peptide of any one of the preceding embodiments, wherein when the amino acid residue at position Z⁵ is replaced with an amino acid residue that is different from the amino acid residue recited at said position, the amino acid residue at position Z⁵ is replaced with an amino acid residue selected from the group consisting of: A, APEG2Ser(S*), Dab(Me)₃, F, Gab, K(cPEG3a), K(Me)₃, K(PEG2PEG2gEC12), K(PEG2PEG2gEC14), L, N, N(N(Me)), N(NMe), Q and W.

### Numbered Embodiment 184

[3476] 184. The cyclic peptide of any one of the preceding embodiments, wherein when the amino acid residue at position Z⁵ is replaced with an amino acid residue that is different from the amino acid residue recited at said position, the amino acid residue at position Z⁵ is replaced with an amino acid residue comprising at least one quaternary amine selected from the group consisting of: APEG2Ser(S*), Dab(Me)₃, K(cPEG3a) and K(Me)₃.

### Numbered Embodiment 185

[3477] 185. The cyclic peptide of any one of the preceding embodiments, wherein when the amino acid residue at position Z⁵ is replaced with an amino acid residue that is different from the amino acid residue recited at said position, the amino acid residue at position Z⁵ is replaced with an amino acid residue that is N(N(Me)₂) substituted on the side chain with one or more groups selected from: —OH, —(C₁-C₄) alkyl, —O(C₁-C₄) alkyl, and —CN.

### Numbered Embodiment 186

[3478] 186. The cyclic peptide of any one of the preceding embodiments, wherein when the amino acid residue at position Z⁵ is replaced with an amino acid residue that is different from the amino acid residue recited at said position, the amino acid residue at position Z⁵ is replaced with an aromatic amino acid residue.

### Numbered Embodiment 187

[3479] 187. The cyclic peptide of any one of the preceding embodiments, wherein when the amino acid residue at position Z⁵ is replaced with an amino acid residue that is different from the amino acid residue recited at said position, the amino acid residue at position Z⁵ is replaced with an aliphatic amino acid residue.

### Numbered Embodiment 188

[3480] 188. The cyclic peptide of any one of the preceding embodiments, wherein when the amino acid residue at position Z⁵ is replaced with an amino acid residue that is different from the amino acid residue recited at said position, the amino acid residue at position Z⁵ is replaced with a hydrophilic amino acid residue.

### Numbered Embodiment 189

[3481] 189. The cyclic peptide of any one of the preceding embodiments, wherein when the amino acid residue at position Z⁵ is replaced with an amino acid residue that is different from the amino acid residue recited at said position, the amino acid residue at position Z⁵ is replaced with a basic amino acid residue.

### Numbered Embodiment 190

[3482] 190. The cyclic peptide of any one of the preceding embodiments, wherein when the amino acid residue at position Z⁵ is replaced with an amino acid residue that is different from the amino acid residue recited at said position, the amino acid residue at position Z⁵ is replaced with an acidic amino acid residue.

### Numbered Embodiment 191

[3483] 191. The cyclic peptide of any one of the preceding embodiments, wherein the amino acid residue at position Z⁵ is replaced with an amino acid residue that is different from the amino acid residue recited at said position.

### Numbered Embodiment 192

[3484] 192. The cyclic peptide of any one of the preceding embodiments, wherein when the amino acid residue at position Z⁶ is replaced with an amino acid residue that is different from the amino acid residue recited at said position, the amino acid residue at position Z⁶ is replaced with an amino acid residue selected from the group consisting of: A and L.

### Numbered Embodiment 193

[3485] 193. The cyclic peptide of any one of the preceding embodiments, wherein when the amino acid residue at position Z⁶ is replaced with an amino acid residue that is different from the amino acid residue recited at said position, the amino acid residue at position Z⁶ is replaced with an amino acid residue that is T substituted on the side chain with one or more groups selected from: —OH, —(C₁-C₄) alkyl, —O(C₁-C₄) alkyl, and —CN.

### Numbered Embodiment 194

[3486] 194. The cyclic peptide of any one of the preceding embodiments, wherein when the amino acid residue at position Z⁶ is replaced with an amino acid residue that is different from the amino acid residue recited at said position, the amino acid residue at position Z⁶ is replaced with an aliphatic amino acid residue.

### Numbered Embodiment 195

[3487] 195. The cyclic peptide of any one of the preceding embodiments, wherein when the amino acid residue at position Z⁶ is replaced with an amino acid residue that is different from the amino acid residue recited at said position, the amino acid residue at position Z⁶ is replaced with a polar amino acid residue.

### Numbered Embodiment 196

[3488] 196. The cyclic peptide of any one of the preceding embodiments, wherein the amino acid residue at position Z⁶ is replaced with an amino acid residue that is different from the amino acid residue recited at said position.

### Numbered Embodiment 197

[3489] 197. The cyclic peptide of any one of the preceding embodiments, wherein when the amino acid residue at position Z⁷ is replaced with an amino acid residue that is different from the amino acid residue recited at said position, the amino acid residue at position Z⁷ is replaced with an amino acid residue selected from the group consisting of: W, 7(3NAcPh)W, 7CF3W, Nme7MeW, 2Nal, A, F and L.

### Numbered Embodiment 198

[3490] 198. The cyclic peptide of any one of the preceding embodiments, wherein when the amino acid residue at position Z⁷ is replaced with an amino acid residue that is different from the amino acid residue recited at said position, the amino acid residue at position Z⁷ is replaced with an amino acid residue that is 7MeW substituted on the side chain with one or more groups selected from: —OH, —(C₁-C₄) alkyl, —O(C₁-C₄) alkyl, and —CN.

### Numbered Embodiment 199

[3491] 199. The cyclic peptide of any one of the preceding embodiments, wherein when the amino acid residue at position Z⁷ is replaced with an amino acid residue that is different from the amino acid residue recited at said position, the amino acid residue at position Z⁷ is replaced with an aromatic amino acid residue.

### Numbered Embodiment 200

[3492] 200. The cyclic peptide of any one of the preceding embodiments, wherein when the amino acid residue at position Z⁷ is replaced with an amino acid residue that is different from the amino acid residue recited at said position, the amino acid residue at position Z⁷ is replaced with an aliphatic amino acid residue.

### Numbered Embodiment 201

[3493] 201. The cyclic peptide of any one of the preceding embodiments, wherein the amino acid residue at position Z⁷ is replaced with an amino acid residue that is different from the amino acid residue recited at said position.

### Numbered Embodiment 202

[3494] 202. The cyclic peptide of any one of the preceding embodiments, wherein when the amino acid residue at position Z⁸ is replaced with an amino acid residue that is different from the amino acid residue recited at said position, the amino acid residue at position Z⁸ is replaced with an amino acid residue selected from the group consisting of. K(NMeAC), Q, 4AmPhe, A, AIB, APEG2Ser, APEG2Ser(R*), APEG2Ser(S*), Cit, Dab(NMeAc), Dab(NMecarn), Dab(NMeCarn), Dab(NMeCOmPEG6), Dab(NMecPEG2a), Dab(NMecPEG3a), Dab(NMecPEG5a), Dap(NMeAc), F, K(4cpg), K(Ac), K(cPEG3a), K(Me)₃, K(NMeCOmPEG6), K(NMePEG3a), K(NmPEG6Ac), K(PEG2PEG2gEC12), K(PEG2PEG2gEC14), L, Paf(Ac), Q(N(Me)2), Q(NHtBu), W, Y and K(cPEG3aCO).

### Numbered Embodiment 203

[3495] 203. The cyclic peptide of any one of the preceding embodiments, wherein when the amino acid residue at position Z⁸ is replaced with an amino acid residue that is different from the amino acid residue recited at said position, the amino acid residue at position Z⁸ is replaced with an amino acid residue comprising at least one quaternary amine selected from the group consisting of. APEG2Ser, APEG2ser, APEG2Ser(R*), APEG2Ser(S*), Dab(NMecarn), Dab(NmeCarn), Dab(NMecPEG2a), Dab(NMecPEG3a), Dab(NMecPEG5a), K(cPEG3a), K(Me)₃ and K(NMePEG3a).

### Numbered Embodiment 204

[3496] 204. The cyclic peptide of any one of the preceding embodiments, wherein when the amino acid residue at position Z⁸ is replaced with an amino acid residue that is different from the amino acid residue recited at said position, the amino acid residue at position Z⁸ is replaced with an amino acid residue that is K(NMeAc) substituted on the side chain with one or more groups selected from: —OH, —(C₁-C₄) alkyl, —O(C₁-C₄) alkyl, and —CN.

### Numbered Embodiment 205

[3497] 205. The cyclic peptide of any one of the preceding embodiments, wherein when the amino acid residue at position Z⁸ is replaced with an amino acid residue that is different from the amino acid residue recited at said position, the amino acid residue at position Z⁸ is replaced with an aromatic amino acid residue.

### Numbered Embodiment 206

[3498] 206. The cyclic peptide of any one of the preceding embodiments, wherein when the amino acid residue at position Z⁸ is replaced with an amino acid residue that is different from the amino acid residue recited at said position, the amino acid residue at position Z⁸ is replaced with an aliphatic amino acid residue.

### Numbered Embodiment 207

[3499] 207. The cyclic peptide of any one of the preceding embodiments, wherein when the amino acid residue at position Z⁸ is replaced with an amino acid residue that is different from the amino acid residue recited at said position, the amino acid residue at position Z⁸ is replaced with a hydrophilic amino acid residue.

### Numbered Embodiment 208

[3500] 208. The cyclic peptide of any one of the preceding embodiments, wherein when the amino acid residue at position Z⁸ is replaced with an amino acid residue that is different from the amino acid residue recited at said position, the amino acid residue at position Z⁸ is replaced with a basic amino acid residue.

### Numbered Embodiment 209

[3501] 209. The cyclic peptide of any one of the preceding embodiments, wherein when the amino acid residue at position Z⁸ is replaced with an amino acid residue that is different from the amino acid residue recited at said position, the amino acid residue at position Z⁸ is replaced with an acidic amino acid residue.

### Numbered Embodiment 210

[3502] 210. The cyclic peptide of any one of the preceding embodiments, wherein the amino acid residue at position Z⁸ is replaced with an amino acid residue that is different from the amino acid residue recited at said position.

### Numbered Embodiment 211

[3503] 211. The cyclic peptide of any one of the preceding embodiments, wherein the amino acid residue at position Z⁹ is the residue of an amino acid comprising a sulfhydryl group selected from the group consisting of: Pen, C or aMeC.

### Numbered Embodiment 212

[3504] 212. The cyclic peptide of any one of the preceding embodiments, wherein the amino acid residue at position Z⁹ is the residue of Pen.

### Numbered Embodiment 213

[3505] 213. The cyclic peptide of any one of the preceding embodiments, wherein when the amino acid residue at position Z¹⁰ is replaced with an amino acid residue that is different from the amino acid residue recited at said position, the amino acid residue at position Z¹⁰ is replaced with an amino acid residue selected from the group consisting of: AEF, 4DMPEF, 4DMPzEF, 4TMABYF, ACHMF, AEF((Ch)cPEG3a), AEF(Ac), AEF(AcCh), AEF(aPEG2a), AEF(BisMEP), AEF(BisMEPa), AEF(BisPEG2a)(RS), AEF(BisPEG2a)(S*), AEF(G), AEF(Me)2, AEF(MEP), AEF(MePrpa), AEF(N(Me)2), AEF(NHCh), AEF(NHcPEG3a), AEF(NMe), AEF(NMe2mPEG3), AEF(NMe3), AEF(NMeBismPEG3), AEF(NMePEG2a), AEF(NmPEG6), AEF(NsCh), AEF(PEG2a), AEF(SPD), APEG2F, APEG3F, dFPPEG3F, Diazabiclyclooctane6F, DMMMF, DMPMF, DMTASF, F(4G), F(4N3), F(4TzlDMA4mPEG), F(4TzlMME), F(4TzlMMo1), F(4TzlMMo3), F(4TzlMMo4), F(4TzlTMA1), F(4TzlTMA2), F(4TzlTMA3), F(4TzlTMA4), F(4TzlTMA5), GPEG3F, hFTMAPF, MMoEF, MMoPF, MMPEG3F, morfTMA4F, mPEG2TMA2F, mPEG2TMA4F, mPEG3TMA4F, MPzPEG3F, MTASF, NPyEF, NPyPEG3F, PiperazinequatF, TBAPEG3F, TMA3F, TMA4F, TMA6F, TMA8F, Tzl(Ch), TzlChmPEG, TzlChmPEG3, Y(C₉OH), Y(OEOXIMECh), Y(OTzlCh), Y(OTzlChC16), Y(OTzlChC8), Y(OTzlC1aC8), Y(OTzlChmPEG), Y(OTzlChmPEG3), Y(OTzlPEG3a), Y(OTzlPEG4a), Y(OTzlTMA4), Y(OZOXIMECh), YC8CO(NHPEG3a), YC8COPip, YCF2H, ACHMF(R*, S*), ACHMF(S*, S*), AEF(cPEG3a), APF, F(4TzlAme2), F(4TzlG2), F(4TzlMMo7) and F(4TzlTMA7).

### Numbered Embodiment 214

[3506] 214. The cyclic peptide of any one of the preceding embodiments, wherein when the amino acid residue at position Z¹⁰ is replaced with an amino acid residue that is different from the amino acid residue recited at said position, the amino acid residue at position Z¹⁰ is replaced with an amino acid residue comprising at least one quaternary amine selected from the group consisting of: 4DMPEF, 4DMPzEF, 4TMABYF, ACHMF, ACHMF(R*, S*), ACHMF(S*, S*), AEF((Ch)cPEG3a), AEF(AcCh), AEF(aPEG2a), AEF(cPEG3a), AEF(BisMEPa), AEF(BisPEG2a)(RS), AEF(BisPEG2a)(S*), AEF(MePrpa), AEF(NHcPEG3a), AEF(NMe2mPEG3), AEF(NMe3), AEF(NMeBismPEG3), AEF(NMePEG2a), AEF(NsCh), AEF(NHCh), AEF(PEG2a), AEF(SPD), APEG2F, APEG3F, dFPPEG3F, Diazabiclyclooctane6F, DMMMF, DMPMF, DMTASF, F(4TzlDMA4mPEG), F(4TzlMMo1), F(4TzlMMo3), F(4TzlMMo4), F(4TzlTMA1), F(4TzlTMA2), F(4TzlTMA3), F(4TzlTMA4), F(4TzlTMA5), F(4TzlMMo7), F(4TzlTMA7), hFTMAPF, MMoEF, MMoPF, MMPEG3F, morfTMA4F, mPEG2TMA2F, mPEG2TMA4F, mPEG3TMA4F, MPzPEG3F, MTASF, NPyEF, NPyPEG3F, PiperazinequatF, TBAPEG3F, TMA3F, TMA4F, TMA6F, TMA8F, Tzl(Ch), TzlChmPEG, TzlChmPEG3, Y(OEOXIMECh), Y(OTzlCh), Y(OTzlChC16), Y(OTzlChC8), Y(OTzlC1aC8), Y(OTzlChmPEG), Y(OTzlChmPEG3), Y(OTzlPEG3a), Y(OTzlPEG4a), Y(OTzlTMA4), Y(OZOXIMECh) and YC8CO(NHPEG3a).

### Numbered Embodiment 215

[3507] 215. The cyclic peptide of any one of the preceding embodiments, wherein when the amino acid residue at position Z¹⁰ is replaced with an amino acid residue that is different from the amino acid residue recited at said position, the amino acid residue at position Z¹⁰ is replaced with an amino acid residue that is TMAPF substituted on the side chain with one or more groups selected from: —OH, —(C₁-C₄) alkyl, —O(C₁-C₄) alkyl, and —CN.

### Numbered Embodiment 216

[3508] 216. The cyclic peptide of any one of the preceding embodiments, wherein when the amino acid residue at position Z¹⁰ is replaced with an amino acid residue that is different from the amino acid residue recited at said position, the amino acid residue at position Z¹⁰ is replaced with an amino acid residue having the following structure:

[chemical structure]

[3509] wherein
[3510] Ln¹ is selected from the group consisting of: an —O—atom,

[chemical structure]

wherein the right hand side of each depicted structure is bound to Ln²;
[3511] Ln² is a linker moiety comprising
   [3512] (i) at least 4 atoms, for example an optionally substituted alkylene comprising at least C₄ atoms, an optionally substituted heteroalkylene comprising at least C₄ atoms, an optionally substituted heteroalkenylene comprising at least C₄ atoms, an optionally substituted alkynylene comprising at least C₄ atoms, an optionally substituted alkylene—optionally substituted carbocyclyl comprising at least C₄ atoms, or an optionally substituted alkylene—optionally substituted heterocyclyl comprising at least C₄ atoms, for example optionally substituted (C₄-C₂₀) alkylene, optionally substituted (C₄-C₂₀) heteroalkylene, optionally substituted (C₄-C₂₀) heteroalkenylene, optionally substituted (C₄-C₂₀) alkynylene, optionally substituted (C₁-C₃) alkylene —optionally substituted (CH₃—C₁₀) carbocyclyl, or optionally substituted (C₁-C₃) alkylene—optionally substituted (CH₃—C₁₄) heterocyclyl, or
   [3513] (ii) at least 2 atoms when Ln is

[chemical structure]

for example an optionally substituted alkylene comprising at least C₂ atoms or an optionally substituted heteroalkylene comprising at least C₂ atoms, for example optionally substituted (C₂-C₂₀) alkylene or optionally substituted (C₂-C₂₀) heteroalkylene; and
[3514] Qu¹ is a quaternary amine.

### Numbered Embodiment 217

[3515] 217. The cyclic peptide of any one of the preceding embodiments, wherein when the amino acid residue at position Z¹⁰ is replaced with an amino acid residue that is different from the amino acid residue recited at said position, the amino acid residue at position Z¹⁰ is replaced with an amino acid residue having the following structure:

[chemical structure]

[3516] wherein Ln¹, Ln² and Qu^{l} are as defined in any one of the preceding embodiments.

### Numbered Embodiment 218

[3517] 218. The cyclic peptide of any one of the preceding embodiments, wherein Qu¹ is a quaternary amine as defined in any one of the preceding embodiments.

### Numbered Embodiment 219

[3518] 219. The cyclic peptide of any one of the preceding embodiments, wherein Ln¹ is an —O-atom.

### Numbered Embodiment 220

[3519] 220. The cyclic peptide of any one of the preceding embodiments, wherein Ln² is selected from the group consisting of: optionally substituted (C₄-C₁₅) alkylene, optionally substituted (C₄-C₁₅) heteroalkylene, optionally substituted (C₄-C₁₅) heteroalkenylene, optionally substituted (C₄-C₁₅) alkynylene, optionally substituted (C₁-C₃) alkylene—optionally substituted (C₅-C₇) carbocyclyl, or optionally substituted (C₁-C₃) alkylene—optionally substituted (C₅-C₇) heterocyclyl.

### Numbered Embodiment 221

[3520] 221. The cyclic peptide of any one of the preceding embodiments, wherein Ln² is selected from the group consisting of: optionally substituted (C₄-C₁₀) alkylene, optionally substituted (C₄-C₁₀) heteroalkylene, optionally substituted (C₄-C₁₀) heteroalkenylene, optionally substituted (C₄-C₁₀) alkynylene, optionally substituted (C₁-C₃) alkylene—optionally substituted (C) carbocyclyl, or optionally substituted (C₁-C₃) alkylene—optionally substituted (C) heterocyclyl.

### Numbered Embodiment 222

[3521] 222. The cyclic peptide of any one of the preceding embodiments, wherein Ln² is selected from the group consisting of: optionally substituted (C₄-C₈) alkylene, optionally substituted (C₄-C₈) heteroalkylene, optionally substituted (C₄-C₈) heteroalkenylene, optionally substituted (C₄-C₈) alkynylene, optionally substituted (C₁-C₃) alkylene—optionally substituted (C₆) carbocyclyl, or optionally substituted (C₁-C₃) alkylene—optionally substituted (C₆) heterocyclyl.

### Numbered Embodiment 223

[3522] 223. The cyclic peptide of any one of the preceding embodiments, wherein when Ln¹ is

[chemical structure]

Ln² is selected from the group consisting of optionally substituted (C₂-C₁₅) alkylene or optionally substituted (C₂-C₁₅) heteroalkylene.

### Numbered Embodiment 224

[3523] 224. The cyclic peptide of any one of the preceding embodiments, wherein when Ln¹ is

[chemical structure]

Ln² is selected from the group consisting of optionally substituted (C₂-C₁₀) alkylene or optionally substituted (C₂-C₁₀) heteroalkylene.

### Numbered Embodiment 225

[3524] 225. The cyclic peptide of any one of the preceding embodiments, wherein when Ln¹ is

[chemical structure]

Ln² is selected from the group consisting of optionally substituted (C₂-C₅) alkylene or optionally substituted (C₂-C₅) heteroalkylene.

### Numbered Embodiment 226

[3525] 226. The cyclic peptide of any one of the preceding embodiments, wherein when Ln² is optionally substituted alkylene, the optionally substituted alkylene is unsubstituted or is substituted with one or more substituents independently selected from the group consisting of Fluoro.

### Numbered Embodiment 227

[3526] 227. The cyclic peptide of any one of the preceding embodiments, wherein when Ln² is optionally substituted heteroalkylene, the optionally substituted heteroalkylene is unsubstituted or is substituted with one or more substituents independently selected from the group consisting of: (C₁-C₃) alkyl,

[chemical structure]

═O (i.e., two geminal hydrogens on a carbon atom of the heteroalkylene are replaced with the group ═O), or a quaternary amine of any one of the preceding embodiments, for example, —N⁺(CH₃)₃.

### Numbered Embodiment 228

[3527] 228. The cyclic peptide of any one of the preceding embodiments, wherein when Ln² is optionally substituted heteroalkenylene, the optionally substituted heteroalkenylene is unsubstituted.

### Numbered Embodiment 229

[3528] 229. The cyclic peptide of any one of the preceding embodiments, wherein when Ln² is optionally substituted alkynylene, the optionally substituted alkynylene is unsubstituted.

### Numbered Embodiment 230

[3529] 230. The cyclic peptide of any one of the preceding embodiments, wherein when Ln² is optionally substituted alkylene—optionally substituted carbocyclyl, the optionally substituted alkylene—optionally substituted carbocyclyl is unsubstituted.

### Numbered Embodiment 231

[3530] 231. The cyclic peptide of any one of the preceding embodiments, wherein when Ln² is optionally substituted alkylene—optionally substituted heterocyclyl, the optionally substituted alkylene—optionally substituted heterocyclyl is unsubstituted.

### Numbered Embodiment 232

[3531] 232. The cyclic peptide of any one of the preceding embodiments, wherein when the amino acid residue at position Z¹⁰ is replaced with an amino acid residue that is different from the amino acid residue recited at said position, the amino acid residue at position Z¹⁰ is replaced with an amino acid residue having the following structure:

[chemical structure]

[3532] wherein
[3533] Ln³ is selected from the group consisting of: an —O—atom,

[chemical structure]

wherein the right hand side of each depicted structure is bound to Ln⁴;
[3534] Ln⁴ is a linker moiety comprising at least 2 atoms, for example an optionally substituted alkylene comprising at least C₂ atoms, an optionally substituted heteroalkylene comprising at least C₂ atoms, or an optionally substituted alkynylene comprising at least C₂ atoms, for example optionally substituted (C₂-C₂₀) alkylene, optionally substituted (C₂-C₂₀) heteroalkylene or optionally substituted (C₂-C₂₀) alkynylene; and
[3535] Qu² is a (CH₃—C₁₄) heterocyclyl quaternary amine, a (C₅-C₁₄) heteroaryl quaternary amine or a (C₅-C₁₄) bicyclic heterocyclyl quaternary amine, for example, a (CH₃—C₁₄) heterocyclyl quaternary amine selected from the group consisting of:

[chemical structure]

a (C₅-C₁₄) heteroaryl quaternary amine selected from the group consisting of:

[chemical structure]

or a (C₅-C₁₄) bicyclic heterocyclyl quaternary amine selected from the group consisting of

[chemical structure]

### Numbered Embodiment 233

[3536] 233. The cyclic peptide of any one of the preceding embodiments, wherein when the amino acid residue at position Z¹⁰ is replaced with an amino acid residue that is different from the amino acid residue recited at said position, the amino acid residue at position Z¹⁰ is replaced with an amino acid residue having the following structure:

[chemical structure]

[3537] wherein Ln³, Ln⁴ and Qu² are as defined in any one of the preceding embodiments.

### Numbered Embodiment 234

[3538] 234. The cyclic peptide of any one of the preceding embodiments, wherein Qu² is a quaternary amine as defined in any one of the preceding embodiments.

### Numbered Embodiment 235

[3539] 235. The cyclic peptide of any one of the preceding embodiments, wherein Ln³ is an —O-atom.

### Numbered Embodiment 236

[3540] 236. The cyclic peptide of any one of the preceding embodiments, wherein Ln⁴ is selected from the group consisting of: optionally substituted (C₂-C₁₅) alkylene, optionally substituted (C₂-C₁₅) heteroalkylene or optionally substituted (C₂-C₁₅) alkynylene.

### Numbered Embodiment 237

[3541] 237. The cyclic peptide of any one of the preceding embodiments, wherein Ln⁴ is selected from the group consisting of: optionally substituted (C₂-C₁₀) alkylene, optionally substituted (C₂-C₁₀) heteroalkylene or optionally substituted (C₂-C₁₀) alkynylene.

### Numbered Embodiment 238

[3542] 238. The cyclic peptide of any one of the preceding embodiments, wherein Ln⁴ is selected from the group consisting of: optionally substituted (C₂-C₈) alkylene, optionally substituted (C₂-C₈) heteroalkylene or optionally substituted (C₂-C₈) alkynylene.

### Numbered Embodiment 239

[3543] 239. The cyclic peptide of any one of the preceding embodiments, wherein when Ln⁴ is optionally substituted alkylene, the optionally substituted alkylene is unsubstituted or is substituted with one or more substituents independently selected from the group consisting of Fluoro.

### Numbered Embodiment 240

[3544] 240. The cyclic peptide of any one of the preceding embodiments, wherein when Ln⁴ is optionally substituted heteroalkylene, the optionally substituted heteroalkylene is unsubstituted or is substituted with one or more substituents independently selected from the group consisting of: (C₁-C₃) alkyl,

[chemical structure]

═O (i.e., two geminal hydrogens on a carbon atom of the heteroalkylene are replaced with the group ═O), or a quaternary amine of any one of the preceding embodiments, for example, —N⁺(CH₃)₃.

### Numbered Embodiment 241

[3545] 241. The cyclic peptide of any one of the preceding embodiments, wherein when Ln⁴ is optionally substituted alkynylene, the optionally substituted alkynylene is unsubstituted.

### Numbered Embodiment 242

[3546] 242. The cyclic peptide of any one of the preceding embodiments, wherein when the amino acid residue at position Z¹⁰ is replaced with an amino acid residue that is different from the amino acid residue recited at said position, the amino acid residue at position Z¹⁰ is replaced with an aromatic amino acid residue.

### Numbered Embodiment 243

[3547] 243. The cyclic peptide of any one of the preceding embodiments, wherein the amino acid residue at position Z¹⁰ is replaced with an amino acid residue that is different from the amino acid residue recited at said position.

### Numbered Embodiment 244

[3548] 244. The cyclic peptide of any one of the preceding embodiments, wherein when the amino acid residue at position Z¹¹ is replaced with an amino acid residue that is different from the amino acid residue recited at said position, the amino acid residue at position Z¹¹ is replaced with an amino acid residue selected from the group consisting of: A, F, L and W.

### Numbered Embodiment 245

[3549] 245. The cyclic peptide of any one of the preceding embodiments, wherein when the amino acid residue at position Z¹¹ is replaced with an amino acid residue that is different from the amino acid residue recited at said position, the amino acid residue at position Z¹¹ is replaced with an amino acid residue that is 2Nal substituted on the side chain naphthalene ring with one or more groups selected from: —OH, —(C₁-C₄) alkyl, —O(C₁-C₄) alkyl, and —CN.

### Numbered Embodiment 246

[3550] 246. The cyclic peptide of any one of the preceding embodiments, wherein when the amino acid residue at position Z¹¹ is replaced with an amino acid residue that is different from the amino acid residue recited at said position, the amino acid residue at position Z¹¹ is replaced with an aromatic amino acid residue.

### Numbered Embodiment 247

[3551] 247. The cyclic peptide of any one of the preceding embodiments, wherein when the amino acid residue at position Z¹¹ is replaced with an amino acid residue that is different from the amino acid residue recited at said position, the amino acid residue at position Z¹¹ is replaced with an aliphatic amino acid residue.

### Numbered Embodiment 248

[3552] 248. The cyclic peptide of any one of the preceding embodiments, wherein the amino acid residue at position Z¹¹ is replaced with an amino acid residue that is different from the amino acid residue recited at said position.

### Numbered Embodiment 249

[3553] 249. The cyclic peptide of any one of the preceding embodiments, wherein when the amino acid residue at position Z¹² is replaced with an amino acid residue that is different from the amino acid residue recited at said position, the amino acid residue at position Z¹² is replaced with an amino acid residue selected from the group consisting of: A, Achx, Achx(diF), Acpx, Aib, AIB, aMeK, aMeL, Chg, diFCpx, F, L, Pip(NMe), Pip(NMe2), W and diFAchx.

### Numbered Embodiment 250

[3554] 250. The cyclic peptide of any one of the preceding embodiments, wherein when the amino acid residue at position Z¹² is replaced with an amino acid residue that is different from the amino acid residue recited at said position, the amino acid residue at position Z¹² is replaced with an amino acid residue comprising at least one quaternary amine selected from the group consisting of: Pip(NMe2).

### Numbered Embodiment 251

[3555] 251. The cyclic peptide of any one of the preceding embodiments, wherein when the amino acid residue at position Z¹² is replaced with an amino acid residue that is different from the amino acid residue recited at said position, the amino acid residue at position Z¹² is replaced with an amino acid residue that is THP substituted on the side chain with one or more groups selected from: —OH, —(C₁-C₄) alkyl, —O(C₁-C₄) alkyl, and —CN.

### Numbered Embodiment 252

[3556] 252. The cyclic peptide of any one of the preceding embodiments, wherein when the amino acid residue at position Z¹² is replaced with an amino acid residue that is different from the amino acid residue recited at said position, the amino acid residue at position Z¹² is replaced with an aromatic amino acid residue.

### Numbered Embodiment 253

[3557] 253. The cyclic peptide of any one of the preceding embodiments, wherein when the amino acid residue at position Z¹² is replaced with an amino acid residue that is different from the amino acid residue recited at said position, the amino acid residue at position Z¹² is replaced with an aliphatic amino acid residue.

### Numbered Embodiment 254

[3558] 254. The cyclic peptide of any one of the preceding embodiments, wherein when the amino acid residue at position Z¹² is replaced with an amino acid residue that is different from the amino acid residue recited at said position, the amino acid residue at position Z¹² is replaced with a polar amino acid residue.

### Numbered Embodiment 255

[3559] 255. The cyclic peptide of any one of the preceding embodiments, wherein when the amino acid residue at position Z¹² is replaced with an amino acid residue that is different from the amino acid residue recited at said position, the amino acid residue at position Z¹² is replaced with a hydrophilic amino acid residue.

### Numbered Embodiment 256

[3560] 256. The cyclic peptide of any one of the preceding embodiments, wherein when the amino acid residue at position Z¹² is replaced with an amino acid residue that is different from the amino acid residue recited at said position, the amino acid residue at position Z¹² is replaced with a basic amino acid residue.

### Numbered Embodiment 257

[3561] 257. The cyclic peptide of any one of the preceding embodiments, wherein the amino acid residue at position Z¹² is replaced with an amino acid residue that is different from the amino acid residue recited at said position.

### Numbered Embodiment 258

[3562] 258. The cyclic peptide of any one of the preceding embodiments, wherein when the amino acid residue at position Z¹³ is replaced with an amino acid residue that is different from the amino acid residue recited at said position, the amino acid residue at position Z¹³ is replaced with an amino acid residue selected from the group consisting of: K(NMeAC), E, A, AIB, aMeE, APEG2Ser, APEG2Ser(S*), Cit, Dab(NMeAc), Dab(NMecarn), Dab(NMeCOmPEG6), Dab(NMecPEG2a), Dab(NMecPEG3a), Dap(Ac), Dap(NMeAc), E(c), E(C), F, K(5cpa), K(Ac), K(cPEG3a), K(d), K(D), K(dPEG12Ac), K(dPEG6Ac), K(dPEG9Ac), K(Me)₃, K(NMeCOmPEG6), K(NMeCOPEG4N+Me3), K(NMePEG3a), K(NmPEG6Ac), K(PEG2PEG2gEC12), K(PEG2PEG2gEC14), K(PEG2PEG2PEG2gEC12), L, Q(N(Me)2), Tetrazole, Tetrazole(NMe), W, K(DFN), K(IPB) and Ne.

### Numbered Embodiment 259

[3563] 259. The cyclic peptide of any one of the preceding embodiments, wherein when the amino acid residue at position Z¹³ is replaced with an amino acid residue that is different from the amino acid residue recited at said position, the amino acid residue at position Z¹³ is replaced with an amino acid residue comprising at least one quaternary amine selected from the group consisting of: APEG2Ser, APEG2Ser(S*), Dab(NMecarn), Dab(NMecPEG2a), Dab(NMecPEG3a), K(5cpa), K(cPEG3a), E(c), E(C), K(d), K(D), K(Me)₃, K(NMeCOPEG4N+Me3) and K(NMePEG3a).

### Numbered Embodiment 260

[3564] 260. The cyclic peptide of any one of the preceding embodiments, wherein when the amino acid residue at position Z¹³ is replaced with an amino acid residue that is different from the amino acid residue recited at said position, the amino acid residue at position Z¹³ is replaced with an amino acid residue that is K(NMeAc) substituted on the side chain with one or more groups selected from: —OH, —(C₁-C₄) alkyl, —O(C₁-C₄) alkyl, and —CN.

### Numbered Embodiment 261

[3565] 261. The cyclic peptide of any one of the preceding embodiments, wherein when the amino acid residue at position Z¹³ is replaced with an amino acid residue that is different from the amino acid residue recited at said position, the amino acid residue at position Z¹³ is replaced with an aromatic amino acid residue.

### Numbered Embodiment 262

[3566] 262. The cyclic peptide of any one of the preceding embodiments, wherein when the amino acid residue at position Z¹³ is replaced with an amino acid residue that is different from the amino acid residue recited at said position, the amino acid residue at position Z¹³ is replaced with an aliphatic amino acid residue.

### Numbered Embodiment 263

[3567] 263. The cyclic peptide of any one of the preceding embodiments, wherein when the amino acid residue at position Z¹³ is replaced with an amino acid residue that is different from the amino acid residue recited at said position, the amino acid residue at position Z¹³ is replaced with a hydrophilic amino acid residue.

### Numbered Embodiment 264

[3568] 264. The cyclic peptide of any one of the preceding embodiments, wherein when the amino acid residue at position Z¹³ is replaced with an amino acid residue that is different from the amino acid residue recited at said position, the amino acid residue at position Z¹³ is replaced with an acidic amino acid residue.

### Numbered Embodiment 265

[3569] 265. The cyclic peptide of any one of the preceding embodiments, wherein the amino acid residue at position Z¹³ is replaced with an amino acid residue that is different from the amino acid residue recited at said position.

### Numbered Embodiment 266

[3570] 266. The cyclic peptide of any one of the preceding embodiments, wherein when the amino acid residue at position Z¹⁴ is replaced with an amino acid residue that is different from the amino acid residue recited at said position, the amino acid residue at position Z¹⁴ is replaced with an amino acid residue selected from the group consisting of: K(Ac) and N(NMe).

### Numbered Embodiment 267

[3571] 267. The cyclic peptide of any one of the preceding embodiments, wherein when the amino acid residue at position Z¹⁴ is replaced with an amino acid residue that is different from the amino acid residue recited at said position, the amino acid residue at position Z¹⁴ is replaced with an amino acid residue that is N substituted on the side chain with one or more groups selected from: —OH, —(C₁-C₄) alkyl, —O(C₁-C₄) alkyl, and —CN.

### Numbered Embodiment 268

[3572] 268. The cyclic peptide of any one of the preceding embodiments, wherein when the amino acid residue at position Z¹⁴ is replaced with an amino acid residue that is different from the amino acid residue recited at said position, the amino acid residue at position Z¹⁴ is replaced with a hydrophilic amino acid residue.

### Numbered Embodiment 269

[3573] 269. The cyclic peptide of any one of the preceding embodiments, wherein the amino acid residue at position Z¹⁴ is replaced with an amino acid residue that is different from the amino acid residue recited at said position.

### Numbered Embodiment 270

[3574] 270. The cyclic peptide of any one of the preceding embodiments, wherein when the amino acid residue at position Z¹⁵ is replaced with an amino acid residue that is different from the amino acid residue recited at said position, the amino acid residue at position Z¹⁵ is replaced with an amino acid residue selected from the group consisting of: 3pya, 5CF33Pya, 5MePyridinAla, bAla, dK, dL, F, f, H, h, k, N, NMe3Pya, NMebAla, NMeDTyr, orn, Paf, s, t, THP, v, y and A.

### Numbered Embodiment 271

[3575] 271. The cyclic peptide of any one of the preceding embodiments, wherein when the amino acid residue at position Z¹⁵ is replaced with an amino acid residue that is different from the amino acid residue recited at said position, the amino acid residue at position Z¹⁵ is replaced with an amino acid residue that is 3Pya substituted on the side chain with one or more groups selected from: —OH, —(C₁-C₄) alkyl, —O(C₁-C₄) alkyl, and —CN.

### Numbered Embodiment 272

[3576] 272. The cyclic peptide of any one of the preceding embodiments, wherein when the amino acid residue at position Z¹⁵ is replaced with an amino acid residue that is different from the amino acid residue recited at said position, the amino acid residue at position Z¹⁵ is replaced with an amino acid residue comprising at least one quaternary amine selected from the group consisting of: NMe3Pya.

### Numbered Embodiment 273

[3577] 273. The cyclic peptide of any one of the preceding embodiments, wherein when the amino acid residue at position Z¹⁵ is replaced with an amino acid residue that is different from the amino acid residue recited at said position, the amino acid residue at position Z¹⁵ is replaced with an aromatic amino acid residue.

### Numbered Embodiment 274

[3578] 274. The cyclic peptide of any one of the preceding embodiments, wherein when the amino acid residue at position Z¹⁵ is replaced with an amino acid residue that is different from the amino acid residue recited at said position, the amino acid residue at position Z¹⁵ is replaced with an aliphatic amino acid residue.

### Numbered Embodiment 275

[3579] 275. The cyclic peptide of any one of the preceding embodiments, wherein when the amino acid residue at position Z¹⁵ is replaced with an amino acid residue that is different from the amino acid residue recited at said position, the amino acid residue at position Z¹⁵ is replaced with a polar amino acid residue.

### Numbered Embodiment 276

[3580] 276. The cyclic peptide of any one of the preceding embodiments, wherein when the amino acid residue at position Z¹⁵ is replaced with an amino acid residue that is different from the amino acid residue recited at said position, the amino acid residue at position Z¹⁵ is replaced with a hydrophilic amino acid residue.

### Numbered Embodiment 277

[3581] 277. The cyclic peptide of any one of the preceding embodiments, wherein when the amino acid residue at position Z¹¹ is replaced with an amino acid residue that is different from the amino acid residue recited at said position, the amino acid residue at position Z¹¹ is replaced with a basic amino acid residue.

### Numbered Embodiment 278

[3582] 278. The cyclic peptide of any one of the preceding embodiments, wherein when the amino acid residue at position Z¹¹ is replaced with an amino acid residue that is different from the amino acid residue recited at said position, the amino acid residue at position Z¹¹ is replaced with a non-polar amino acid residue.

### Numbered Embodiment 279

[3583] 279. The cyclic peptide of any one of the preceding embodiments, wherein the amino acid residue at position Z¹¹ is replaced with an amino acid residue that is different from the amino acid residue recited at said position.

### Numbered Embodiment 280

[3584] 280. The cyclic peptide of any one of the preceding embodiments, wherein when the amino acid residue at position Z¹⁶ is replaced with an amino acid residue that is different from the amino acid residue recited at said position, the amino acid residue at position Z¹⁶ is replaced with an amino acid residue selected from the group consisting of: 4diFPro, NMeDTyr, NMeK(PEG2PEG2C₁₂), NMeK(PEG2PEG2C₁₄), NMeK(PEG2PEG2gEC12), NMeK(PEG2PEG2gEC14), NMeK(PEG2PEG2K(PEG2PEG2gEC12)₂), NMeK(PEG2PEG2K(PEG2PEG2PEG2PEG2gEC12)₂), NMeK(PEG2PEG2PEG2gEC12), NMeK(PEG2PEG2PEG2PEG2gEC12), NMeK(PEG2PEG6gEC12), NMeK(PEG2PEG6gEC14), NMeK(SP6PEG2PEG2C₁₂) and NMeK(SP6PEG2PEG2gEC12).

### Numbered Embodiment 281

[3585] 281. The cyclic peptide of any one of the preceding embodiments, wherein when the amino acid residue at position Z¹⁶ is replaced with an amino acid residue that is different from the amino acid residue recited at said position, the amino acid residue at position Z¹⁶ is replaced with an amino acid residue comprising at least one quaternary amine selected from the group consisting of: NMeK(SP6PEG2PEG2C₁₂) and NMeK(SP6PEG2PEG2gEC12).

### Numbered Embodiment 282

[3586] 282. The cyclic peptide of any one of the preceding embodiments, wherein when the amino acid residue at position Z¹⁶ is replaced with an amino acid residue that is different from the amino acid residue recited at said position, the amino acid residue at position Z¹⁶ is replaced with an amino acid residue that is Sar substituted on the side chain with one or more groups selected from: —OH, —(C₁-C₄) alkyl, —O(C₁-C₄) alkyl, and —CN.

### Numbered Embodiment 283

[3587] 283. The cyclic peptide of any one of the preceding embodiments, wherein when the amino acid residue at position Z¹⁶ is replaced with an amino acid residue that is different from the amino acid residue recited at said position, the amino acid residue at position Z¹⁶ is replaced with an aromatic amino acid residue.

### Numbered Embodiment 284

[3588] 284. The cyclic peptide of any one of the preceding embodiments, wherein when the amino acid residue at position Z¹⁶ is replaced with an amino acid residue that is different from the amino acid residue recited at said position, the amino acid residue at position Z¹⁶ is replaced with an acidic amino acid residue.

### Numbered Embodiment 285

[3589] 285. The cyclic peptide of any one of the preceding embodiments, wherein when the amino acid residue at position Z¹⁶ is replaced with an amino acid residue that is different from the amino acid residue recited at said position, the amino acid residue at position Z¹⁶ is replaced with a polar amino acid residue.

### Numbered Embodiment 286

[3590] 286. The cyclic peptide of any one of the preceding embodiments, wherein when the amino acid residue at position Z¹⁶ is replaced with an amino acid residue that is different from the amino acid residue recited at said position, the amino acid residue at position Z¹⁶ is replaced with a hydrophilic amino acid residue.

### Numbered Embodiment 287

[3591] 287. The cyclic peptide of any one of the preceding embodiments, wherein when the amino acid residue at position Z¹⁶ is replaced with an amino acid residue that is different from the amino acid residue recited at said position, the amino acid residue at position Z¹⁶ is replaced with a non-polar amino acid residue.

### Numbered Embodiment 288

[3592] 288. The cyclic peptide of any one of the preceding embodiments, wherein the amino acid residue at position Z¹⁶ is replaced with an amino acid residue that is different from the amino acid residue recited at said position.

### Numbered Embodiment 289

[3593] 289. The cyclic peptide of any one of the preceding embodiments, wherein the amino acid residue(s) specified at a given position are substituted on the side chain with one or more groups selected from: —OH, —(C₁-C₄) alkyl, —O(C₁-C₄) alkyl, and —CN.

### Numbered Embodiment 290

[3594] 290. The cyclic peptide of any one of the preceding embodiments, wherein R^{NT} is selected from the group consisting of: —C(O)-optionally substituted (C₁-C₁₅) alkyl and —C(O)-optionally substituted (C₁-C₃₅) heteroalkyl.

### Numbered Embodiment 291

[3595] 291. The cyclic peptide of any one of the preceding embodiments, wherein R^{NT} is selected from the group consisting of: —C(O)-optionally substituted (C₁-C₁₀) alkyl and —C(O)-optionally substituted (C₁-C₃₅) heteroalkyl.

### Numbered Embodiment 292

[3596] 292. The cyclic peptide of any one of the preceding embodiments, wherein R^{NT} is selected from the group consisting of: —C(O)-optionally substituted (C₁-C₈) alkyl and —C(O)-optionally substituted (C₁-C₃₀) heteroalkyl.

### Numbered Embodiment 293

[3597] 293. The cyclic peptide of any one of the preceding embodiments, wherein R^{NT} is selected from the group consisting of: —C(O)-optionally substituted (C₁-C₆) alkyl and —C(O)-optionally substituted (C₁-C₃₀) heteroalkyl.

### Numbered Embodiment 294

[3598] 294. The cyclic peptide of any one of the preceding embodiments, wherein R^{NT} is selected from the group consisting of: (d)gEPEG2PEG2CO, 4cpgCO, 5cpaCO, AcdPEG12CO, AcdPEG6CO, AcdPEG9CO, CEPEG2PEG2CO, C₁₄gEPEG2PEG2CO, CF3CO, CF3propylamide, cPEG2gCO, cPEG3aCO, cPEG3gCO, cPEG5aCO, EtCO, F3CO, MeCO, mPEG3CO, mPEG6CO, cPEG3AmCO, DFNCO, DFNPEG2PEG2CO, IPBCO and IPBPEG2PEG2CO.

### Numbered Embodiment 295

[3599] 295. The cyclic peptide of any one of the preceding embodiments, wherein R^{NT} is an —C(O)-optionally substituted (C₁-C₂₀) alkyl, for example, 4cpgCO, CF3CO, CF3propylamide, EtCO, F3CO, MeCO or 5cpaCO.

### Numbered Embodiment 296

[3600] 296. The cyclic peptide of any one of the preceding embodiments, wherein R^{NT} is an —C(O)-optionally substituted (C₁-C₂₀) alkyl that comprises a quaternary amine, for example, 5cpaCO.

### Numbered Embodiment 297

[3601] 297. The cyclic peptide of any one of the preceding embodiments, wherein R^{NT} is an —C(O)-optionally substituted (C₁-C₄₀) heteroalkyl, for example, AcdPEG12CO, AcdPEG6CO, AcdPEG9CO, CEPEG2PEG2CO, cPEG2gCO, cPEG3gCO, mPEG3CO, mPEG6CO, (d)gEPEG2PEG2CO, cPEG3aCO, and cPEG5aCO.

### Numbered Embodiment 298

[3602] 298. The cyclic peptide of any one of the preceding embodiments, wherein R^{NT} is an —C(O)-optionally substituted (C₁-C₄₀) heteroalkyl that comprises a quaternary amine, for example, (d)gEPEG2PEG2CO, cPEG3aCO, cPEG5aCO.

### Numbered Embodiment 299

[3603] 299. The cyclic peptide of any one of the preceding embodiments, wherein R^{NT} is an —C(O)-optionally substituted heteroalkyl that comprises a hydrophilic polymer, for example, polyethylene glycol (PEG).

### Numbered Embodiment 300

[3604] 300. The cyclic peptide of any one of the preceding embodiments, wherein R^{NT} is an —C(O)-optionally substituted heteroalkyl that comprises the formula —[O—CH₂CH₂]n-, wherein n is an integer, for example wherein:
[3605] (i) n is an integer from about 1 to about 20;
[3606] (ii) n is an integer from about 1 to about 15;
[3607] (iii) n is an integer from about 1 to about 10; or
[3608] (iv) n is an integer from about 2 to about 12.

### Numbered Embodiment 301

[3609] 301. The cyclic peptide of any one of the preceding embodiments, wherein when R^{NT} is a —C(O)-optionally substituted heteroalkyl, the —C(O)-optionally substituted heteroalkyl is unsubstituted or is substituted with one or more substituents independently selected from the group consisting of: —OH, —NH₂, —CO₂H, —CO₂CH₃, —NH(C═NH)NH₂, ═O (i.e., two geminal hydrogens on a carbon atom of the heteroalkyl are replaced with the group ═O),

[chemical structure]

or a quaternary amine of any one of the preceding embodiments, for example, —N+(CH₃)₃.

### Numbered Embodiment 302

[3610] 302. The cyclic peptide of any one of the preceding embodiments, wherein when R^{NT} is a —C(O)-optionally substituted alkyl, the —C(O)-optionally substituted alkyl is unsubstituted or is substituted with one or more substituents independently selected from the group consisting of: Fluoro, —NH(C═NH)NH₂,

[chemical structure]

or a quaternary amine of any one of the preceding embodiments, for example, —N+(CH₃)₃.

### Numbered Embodiment 303

[3611] 303. The cyclic peptide of any one of the preceding embodiments, wherein
[3612] (i) each R^{Y} and R^{Z} is independently selected from the group consisting of: hydrogen, optionally substituted (C₁-C₁₀) alkyl and optionally substituted (C₁-C₂₅) heteroalkyl, or
[3613] (ii) R^{Y} and R^{Z} come together with the N atom to which they are attached to form an optionally substituted (C₅0.7) heterocyclic ring or an optionally substituted (C₇-C₉) bicyclic heterocyclic ring.

### Numbered Embodiment 304

[3614] 304. The cyclic peptide of any one of the preceding embodiments, wherein
[3615] (i) each R^{Y} and R^{Z} is independently selected from the group consisting of: hydrogen, optionally substituted (C₁-C₈) alkyl and optionally substituted (C₁-C₂₀) heteroalkyl, or
[3616] (ii) R^{Y} and R^{Z} come together with the N atom to which they are attached to form an optionally substituted (C) heterocyclic ring or an optionally substituted (C₈) bicyclic heterocyclic ring.

### Numbered Embodiment 305

[3617] 305. The cyclic peptide of any one of the preceding embodiments, wherein R^{CT} is selected from the group consisting of: CONH2, CO(DiFPip), CO(Morph), CO(mPEG8), CO(NHPEG3a), CO(OAZBO), CO(TFMOHPip), CON(Me)2, CON(MePEG2), CON(mPEG2), CON(NMePip), CONH(PEG3a), CONH(PEG5a), CONHMe and CONMe2.

### Numbered Embodiment 306

[3618] 306. The cyclic peptide of any one of the preceding embodiments, wherein R^{CT} is selected from the group consisting of: optionally substituted aminyl, optionally substituted piperidinyl, optionally substituted piperazinyl, optionally substituted morpholinyl and optionally substituted 3-oxa-8-azabicyclo[3.2.1]octanyl.

### Numbered Embodiment 307

[3619] 307. The cyclic peptide of any one of the preceding embodiments, wherein R^{CT} is N(R′)(R^{Z}), wherein R^{Y} is hydrogen and R^{Z} is an optionally substituted (C₁-C₃₀) heteroalkyl that comprises a quaternary amine, for example, CO(NHPEG3a), CONH(PEG3a) or CONH(PEG5a).

### Numbered Embodiment 308

[3620] 308. The cyclic peptide of any one of the preceding embodiments, wherein when R, and/or R^{Z} is an optionally substituted alkyl, each optionally substituted alkyl is independently unsubstituted or is substituted with one or more substituents independently selected from the group consisting of: a quaternary amine of any one of the preceding embodiments, for example, —N+(CH₃)₃.

### Numbered Embodiment 309

[3621] 309. The cyclic peptide of any one of the preceding embodiments, wherein when R, and/or R^{Z} is an optionally substituted heteroalkyl, each optionally substituted heteroalkyl is independently unsubstituted or is substituted with one or more substituents independently selected from the group consisting of: a quaternary amine of any one of the preceding embodiments, for example, —N+(CH₃)₃.

### Numbered Embodiment 310

[3622] 310. The cyclic peptide of any one of the preceding embodiments, wherein when R, and R^{Z} come together with the N atom to which they are attached to form an optionally substituted heterocyclic ring, for example, optionally substituted aminyl, optionally substituted piperidinyl, optionally substituted piperazinyl and optionally substituted morpholinyl, the optionally substituted heterocyclic ring is unsubstituted or is substituted with one or more substituents independently selected from the group consisting of: Fluoro, —OH, —CF₃, (C₁-C₃) alkyl, or a quaternary amine of any one of the preceding embodiments, for example, —N+(CH₃)₃.

### Numbered Embodiment 311

[3623] 311. The cyclic peptide of any one of the preceding embodiments, wherein when R, and R^{Z} come together with the N atom to which they are attached to form an optionally substituted bicyclic heterocyclic ring, for example, optionally substituted 3-oxa-8-azabicyclo[3.2.1]octanyl, the optionally substituted bicyclic heterocyclic ring is unsubstituted or is substituted with one or more substituents independently selected from the group consisting of: Fluoro, —OH, —CF₃, (C₁-C₃) alkyl, or a quaternary amine of any one of the preceding embodiments, for example, —N+(CH₃)₃.

### Numbered Embodiment 312

[3624] 312. The cyclic peptide of any one of the preceding embodiments, wherein the cyclic peptide further comprises one or more natural or unnatural polymer(s) or a combination(s) thereof.

### Numbered Embodiment 313

[3625] 313. The cyclic peptide of any one of the preceding embodiments, wherein the cyclic peptide further comprises a natural or unnatural polymer or a combination thereof.

### Numbered Embodiment 314

[3626] 314. The cyclic peptide of any one of the preceding embodiments, wherein the cyclic peptide further comprises one or more natural or unnatural polymer or a combination thereof that is conjugated to R^{NT}, when present, and/or R^{CT}, when present, and/or the amino acid residues at positions Z³, Z⁵, Z⁶, Z⁷, Z⁸, Z¹⁰, Z¹¹, Z¹², Z¹³, Z¹⁴, Z¹¹ and/or Z¹⁶, when an amino acid residue is present at the position.

### Numbered Embodiment 315

[3627] 315. The cyclic peptide of any one of the preceding embodiments, wherein the cyclic peptide further comprises a natural or unnatural polymer or a combination thereof that is conjugated to R^{NT}, when present, or R^{CT}, when present, or the amino acid residues at positions Z³, Z⁵, Z⁶, Z⁷, Z⁸, Z¹⁰, Z¹¹, Z¹², Z¹³, Z¹⁴, Z¹⁵ or Z¹⁶, when an amino acid residue is present at the position.

### Numbered Embodiment 316

[3628] 316. The cyclic peptide of any one of the preceding embodiments, wherein each natural or unnatural polymer(s) or a combination(s) thereof is/are independently one of the natural or unnatural polymer(s) or a combination(s) thereof disclosed in the description.

### Numbered Embodiment 317

[3629] 317. The cyclic peptide of any one of the preceding embodiments, wherein the cyclic peptide is an inhibitor of an interleukin-23 (IL-23) receptor.

### Numbered Embodiment 318

[3630] 318. The cyclic peptide of any one of the preceding embodiments, wherein the cyclic peptide inhibits the binding of an interleukin-23 (TL-23) to an TL-23 receptor.

### Numbered Embodiment 319

[3631] 319. The cyclic peptide of any one of the preceding embodiments, wherein the cyclic peptide inhibits an interleukin-23 (TL-23) receptor to reduce or prevent the activation of the Jak-Stat signaling molecules, Jak2, Tyk2, Stat1, Stat 3, Stat 4, and/or Stat 5.

### Numbered Embodiment 320

[3632] 320. The cyclic peptide of any one of the preceding embodiments, wherein the cyclic peptide inhibits an interleukin-23 (IL-23) receptor to reduce or prevent the phosphorylation of Stat 3.

### Numbered Embodiment 321

[3633] 321. The cyclic peptide of any one of the preceding embodiments, wherein the cyclic peptide inhibits an interleukin-23 (IL-23) receptor in a reporter assay with an IC₅₀ value less than about 6.3 μM.

### Numbered Embodiment 322

[3634] 322. The cyclic peptide of any one of the preceding embodiments, wherein the cyclic peptide inhibits an interleukin-23 (IL-23) receptor in a reporter assay with an IC₅₀ value less than about 2 μM.

### Numbered Embodiment 323

[3635] 323. The cyclic peptide of any one of the preceding embodiments, wherein the cyclic peptide inhibits an interleukin-23 (IL-23) receptor in a reporter assay with an IC₅₀ value less than about 1 μM.

### Numbered Embodiment 324

[3636] 324. The cyclic peptide of any one of the preceding embodiments, wherein the cyclic peptide inhibits an interleukin-23 (IL-23) receptor in a reporter assay with an IC₅₀ value less than about 0.5 μM.

### Numbered Embodiment 325

[3637] 325. The cyclic peptide of any one of the preceding embodiments, wherein the cyclic peptide inhibits an interleukin-23 (IL-23) receptor in a reporter assay with an IC₅₀ value less than about 0.25 μM.

### Numbered Embodiment 326

[3638] 326. The cyclic peptide of any one of the preceding embodiments, wherein the cyclic peptide inhibits an interleukin-23 (IL-23) receptor in a reporter assay with an IC₅₀ value less than about 0.1 μM.

### Numbered Embodiment 327

[3639] 327. The cyclic peptide of any one of the preceding embodiments, wherein the cyclic peptide inhibits an interleukin-23 (IL-23) receptor in a reporter assay with an IC₅₀ value less than about 0.05 μM.

### Numbered Embodiment 328

[3640] 328. The cyclic peptide of any one of the preceding embodiments, wherein the cyclic peptide inhibits an interleukin-23 (IL-23) receptor in a reporter assay with an IC₅₀ value less than about 0.025 μM.

### Numbered Embodiment 329

[3641] 329. The cyclic peptide of any one of the preceding embodiments, wherein the cyclic peptide inhibits an interleukin-23 (IL-23) receptor in a reporter assay with an IC₅₀ value less than about 0.01 μM.

### Numbered Embodiment 330

[3642] 330. The cyclic peptide of any one of the preceding embodiments, wherein the cyclic peptide inhibits an interleukin-23 (IL-23) receptor in an IL-23 reporter assay with an IC₅₀ value less than about 0.005 μM.

### Numbered Embodiment 331

[3643] 331. The cyclic peptide of any one of the preceding embodiments, wherein the cyclic peptide inhibits an interleukin-23 (IL-23) receptor in a reporter assay with an IC₅₀ value less than about 0.0025 μM.

### Numbered Embodiment 332

[3644] 332. The cyclic peptide of any one of the preceding embodiments, wherein the IL-23 reporter assay is as described in the description.

### Numbered Embodiment 333

[3645] 333. The cyclic peptide of any one of the preceding embodiments, wherein the cyclic peptide inhibits an interleukin-23 (IL-23) receptor in a peripheral blood mononuclear cell (PBMC) pSTAT3 assay with an IC₅₀ value less than about 0.05 nM.

### Numbered Embodiment 334

[3646] 334. The cyclic peptide of any one of the preceding embodiments, wherein the cyclic peptide inhibits an interleukin-23 (IL-23) receptor in a peripheral blood mononuclear cell (PBMC) pSTAT3 assay with an IC₅₀ value less than about 0.04 nM.

### Numbered Embodiment 335

[3647] 335. The cyclic peptide of any one of the preceding embodiments, wherein the cyclic peptide inhibits an interleukin-23 (IL-23) receptor in a peripheral blood mononuclear cell (PBMC) pSTAT3 assay with an IC₅₀ value less than about 0.03 nM.

### Numbered Embodiment 336

[3648] 336. The cyclic peptide of any one of the preceding embodiments, wherein the cyclic peptide inhibits an interleukin-23 (IL-23) receptor in a peripheral blood mononuclear cell (PBMC) pSTAT3 assay with an IC₅₀ value less than about 0.02 nM.

### Numbered Embodiment 337

[3649] 337. The cyclic peptide of any one of the preceding embodiments, wherein the cyclic peptide inhibits an interleukin-23 (IL-23) receptor in a peripheral blood mononuclear cell (PBMC) pSTAT3 assay with an IC₅₀ value less than about 0.01 nM.

### Numbered Embodiment 338

[3650] 338. The cyclic peptide of any one of the preceding embodiments, wherein the peripheral blood mononuclear cell (PBMC) pSTAT3 assay is as described in the description.

[3651] Numbered Embodiment 339. The cyclic peptide of any one of the preceding embodiments, wherein the cyclic peptide exhibits an Exposed Polar Surface Area (EPSA) of less than about 275 Å² in an EPSA assay.

[3652] Numbered Embodiment 340. The cyclic peptide of any one of the preceding embodiments, wherein the cyclic peptide exhibits an Exposed Polar Surface Area (EPSA) of less than about 250 Å² in an EPSA assay.

[3653] Numbered Embodiment 341. The cyclic peptide of any one of the preceding embodiments, wherein the cyclic peptide exhibits an Exposed Polar Surface Area (EPSA) of less than about 225 Å² in an EPSA assay.

[3654] Numbered Embodiment 342. The cyclic peptide of any one of the preceding embodiments, wherein the cyclic peptide exhibits an Exposed Polar Surface Area (EPSA) of less than about 200 Å² in an EPSA assay.

[3655] Numbered Embodiment 343. The cyclic peptide of any one of the preceding embodiments, wherein the cyclic peptide exhibits an Exposed Polar Surface Area (EPSA) of less than about 175 Å² in an EPSA assay.

[3656] Numbered Embodiment 344. The cyclic peptide of any one of the preceding embodiments, wherein the cyclic peptide exhibits an Exposed Polar Surface Area (EPSA) of less than about 150 Å² in an EPSA assay.

[3657] Numbered Embodiment 345. The cyclic peptide of any one of the preceding embodiments, wherein the cyclic peptide exhibits an Exposed Polar Surface Area (EPSA) of less than about 145 Å² in an EPSA assay.

[3658] Numbered Embodiment 346. The cyclic peptide of any one of the preceding embodiments, wherein the cyclic peptide exhibits an Exposed Polar Surface Area (EPSA) of less than about 140 Å² in an EPSA assay.

[3659] Numbered Embodiment 347. The cyclic peptide of any one of the preceding embodiments, wherein the Exposed Polar Surface Area (EPSA) assay is as described in the description.

[3660] Numbered embodiment 348.A compound which is selected from any one of the tables 1A, 1B, 1C, 1D, lE and 1 For pharmaceutically acceptable salts thereof or solvates thereof.

[3661] Numbered Embodiment 349.A pharmaceutical composition comprising the cyclic peptide or pharmaceutically acceptable salt thereof or solvate thereof of any one of the preceding embodiments, and a pharmaceutically acceptable carrier, excipient, or diluent.

[3662] Numbered Embodiment 350. The pharmaceutical composition of any one of the preceding embodiments, further comprising an enteric coating.

[3663] Numbered Embodiment 351. The pharmaceutical composition of any one of the preceding embodiments, wherein the enteric coating protects and releases the pharmaceutical composition within a subject's lower gastrointestinal system.

[3664] Numbered Embodiment 352. A method for treating an Inflammatory Bowel Disease (IBD), ulcerative colitis, Crohn's disease, Celiac disease (nontropicalSprue), enteropathy associated with seronegative arthropathies, microscopic colitis, collagenous colitis, eosinophilic gastroenteritis, colitis associated with radio- or chemo-therapy, colitis associated with disorders of innate immunity as in leukocyte adhesion deficiency-1, chronic granulomatous disease, glycogen storage disease type ib, Hermansky-Pudlak syndrome, Chediak-Higashi syndrome, and Wiskott-Aldrich Syndrome, pouchitis resulting after proctocolectomy and ileoanal anastomosis, gastrointestinal cancer, pancreatitis, insulin-dependent diabetes mellitus, mastitis, cholecystitis, cholangitis, pericholangitis, chronic bronchitis, chronic sinusitis, asthma, psoriasis, psoriatic arthritis, or graft versus host disease in a subject, comprising providing to the subject an effective amount of the cyclic peptide or pharmaceutically acceptable salt thereof or solvate thereof of any one of the preceding embodiments, or the pharmaceutical composition of any one of the preceding embodiments.

[3665] Numbered Embodiment 353. The method of any one of the preceding embodiments, wherein the cyclic peptide or pharmaceutically acceptable salt thereof or solvate thereof or the pharmaceutical composition is provided to the subject by an oral, parenteral, intravenous, peritoneal, intradermal, subcutaneous, intramuscular, intrathecal, inhalation, vaporization, nebulization, sublingual, buccal, parenteral, rectal, intraocular, inhalation, topically, vaginal, or topical route of administration.

[3666] Numbered Embodiment 354. The method of any one of the preceding embodiments for treating Inflammatory Bowel Disease (IBD), ulcerative colitis, or Crohn's disease, wherein the cyclic peptide or pharmaceutically acceptable salt thereof or solvate thereof or the pharmaceutical composition is provided to the subject orally.

[3667] Numbered embodiment 355. The method of any one of the preceding embodiments for treating psoriasis, wherein the cyclic peptide or pharmaceutically acceptable salt thereof or solvate thereof or the pharmaceutical composition is provided to the subject orally, topically, parenterally, intravenously, subcutaneously, peritonealy, or intravenously.

[3668] Numbered Embodiment 356. The cyclic peptide of any one of the preceding embodiments, or the pharmaceutical composition of any one of the preceding embodiments for use in the treatment of an Inflammatory Bowel Disease (IBD), ulcerative colitis, Crohn's disease, Celiac disease (nontropical Sprue), enteropathy associated with seronegative arthropathies, microscopic colitis, collagenous colitis, eosinophilic gastroenteritis, colitis associated with radio- or chemo-therapy, colitis associated with disorders of innate immunity as in leukocyte adhesion deficiency-1, chronic granulomatous disease, glycogen storage disease type 1b, Hermansky-Pudlak syndrome, Chediak-Higashi syndrome, and Wiskott-Aldrich Syndrome, pouchitis resulting after proctocolectomy and ileoanal anastomosis, gastrointestinal cancer, pancreatitis, insulin-dependent diabetes mellitus, mastitis, cholecystitis, cholangitis, pericholangitis, chronic bronchitis, chronic sinusitis, asthma, psoriasis, psoriatic arthritis, or graft versus host disease in a subject, comprising providing to the subject an effective amount of the cyclic peptide or pharmaceutically acceptable salt thereof or solvate thereof of any one of the preceding embodiments, or the pharmaceutical composition of any one of the preceding embodiments.

[3669] Numbered Embodiment 357. The cyclic peptide for use according to any one of the preceding embodiments or the pharmaceutical composition for use according to any one of the preceding embodiments, wherein the cyclic peptide or pharmaceutically acceptable salt thereof or solvate thereof or the pharmaceutical composition is provided to the subject by an oral, parenteral, intravenous, peritoneal, intradermal, subcutaneous, intramuscular, intrathecal, inhalation, vaporization, nebulization, sublingual, buccal, parenteral, rectal, intraocular, inhalation, topically, vaginal, or topical route of administration.

[3670] Numbered Embodiment 358. The cyclic peptide for use according to any one of the preceding embodiments or the pharmaceutical composition for use according to any one of the preceding embodiments, for use in the treatment of Inflammatory Bowel Disease (IBD), ulcerative colitis, or Crohn's disease, wherein the cyclic peptide or pharmaceutically acceptable salt thereof or solvate thereof or the pharmaceutical composition is provided to the subject orally.

[3671] Numbered Embodiment 359. The cyclic peptide or the pharmaceutical composition for use according to any one of the preceding embodiments, for use in the treatment of psoriasis, wherein the cyclic peptide or pharmaceutically acceptable salt thereof or solvate thereof or the pharmaceutical composition is provided to the subject orally, topically, parenterally, intravenously, subcutaneously, peritonealy, or intravenously.

[3672] Numbered Embodiment 360. The cyclic peptide of any one of the preceding embodiments, or the pharmaceutical composition of any one of the preceding embodiments for use as a medicament.

[3673] Numbered Embodiment 361. The use of the cyclic peptide of any one of the preceding embodiments, or the pharmaceutical composition of any one of the preceding embodiments for the manufacture of a medicament for treating a disease.

[3674] Numbered Embodiment 362. The use of the cyclic peptide of any one of the preceding embodiments, or the pharmaceutical composition of any one of the preceding embodiments for the manufacture of a medicament for treating a disease disclosed in any one of the preceding embodiments.

LENGTHY TABLES
The patent application contains a lengthy table section. A copy of the table is available in electronic form from the USPTO web site (https://seqdata.uspto.gov/docdetail?docId=US20260022143A1). An electronic copy of the table will also be available from the USPTO upon request and payment of the fee set forth in 37 CFR 1.19(b)(3).

The application's sequence listing, which the Patent Office published only in electronic form, follows.

SEQUENCE LISTING (574 sequences)

SEQ ID NO: 1 - protein, 13 aa, synthetic construct
  SITE 1: note = N-terminal acetyl
  SITE 1: note = D-Arginine
  SITE 13: note = C-terminal amidyl
  MOD_RES 2: note = L-penicillamine
  MOD_RES 7: note = L-penicillamine
  MOD_RES 13: note = N-methyl-beta-alanine
  MOD_RES 9: note = 3-(2-naphthyl)-L-alanine
  MOD_RES 8: note = 4-(2-aminoethoxy)-L-phenylalanine
  MOD_RES 10: note = 4-aminotetrahydro-2H-pyran-4-carboxylic acid
RXQTWQXXXXENX

SEQ ID NO: 2 - protein, 13 aa, synthetic construct
  SITE 1: note = N-terminal propionoyl
  SITE 13: note = C-terminal amidyl
  SITE 1: note = D-Arginine
  MOD_RES 2: note = L-penicillamine
  MOD_RES 7: note = L-penicillamine
  MOD_RES 9: note = 3-(2-naphthyl)-L-alanine
  MOD_RES 13: note = N-methyl-beta-alanine
  MOD_RES 8: note = 4-(2-aminoethoxy)-L-phenylalanine
  MOD_RES 10: note = 4-aminotetrahydro-2H-pyran-4-carboxylic acid
RXQTWQXXXXENX

SEQ ID NO: 3 - protein, 14 aa, synthetic construct
  SITE 1: note = N-terminal acetyl
  SITE 1: note = D-Arginine
  SITE 14: note = C-terminal amidyl
  MOD_RES 2: note = L-penicillamine
  MOD_RES 7: note = L-penicillamine
  MOD_RES 9: note = 3-(2-naphthyl)-L-alanine
  MOD_RES 14: note = N-methyl-D-tyrosine
  MOD_RES 11: note = 2-methyl-glutamic acid
  MOD_RES 8: note = 4-(2-aminoethoxy)-L-phenylalanine
  MOD_RES 10: note = 4-aminotetrahydro-2H-pyran-4-carboxylic acid
RXQTWQXXXXXNFX

SEQ ID NO: 4 - protein, 14 aa, synthetic construct
  SITE 1: note = N-terminal acetyl
  SITE 1: note = D-Arginine
  SITE 14: note = C-terminal amidyl
  MOD_RES 2: note = L-penicillamine
  MOD_RES 7: note = L-penicillamine
  MOD_RES 9: note = 3-(2-naphthyl)-L-alanine
  MOD_RES 14: note = N-methyl-D-tyrosine
  MOD_RES 10: note = 4-aminotetrahydro-2H-pyran-4-carboxylic acid
  MOD_RES 8: note = 4-(2-aminoethoxy)-L-phenylalanine
RXQTWQXXXXENNX

SEQ ID NO: 5 - protein, 13 aa, synthetic construct
  SITE 1: note = N-terminal acetyl
  SITE 12: note = D-Lysine
  SITE 13: note = C-terminal amidyl
  MOD_RES 1: note = L-penicillamine
  MOD_RES 6: note = L-penicillamine
  MOD_RES 4: note = 7-methyl-L-tryptophan
  MOD_RES 5: note = N6-acetyl-L-lysine
  MOD_RES 7: note = 4-(2-aminoethoxy)-L-phenylalanine
  MOD_RES 8: note = 3-(2-naphthyl)-L-alanine
  MOD_RES 9: note = (S)-2,6-diamino-2-methylhexanoic acid
  MOD_RES 10: note = N6-acetyl-L-lysine
  MOD_RES 13: note = N-methyl-D-tyrosine
XNTWKXXXKKNKX

SEQ ID NO: 6 - protein, 13 aa, synthetic construct
  SITE 1: note = N-terminal acetyl
  SITE 12: note = D-Leucine
  SITE 13: note = C-terminal amidyl
  MOD_RES 1: note = L-penicillamine
  MOD_RES 6: note = L-penicillamine
  MOD_RES 4: note = 7-methyl-L-tryptophan
  MOD_RES 5: note = N6-acetyl-L-lysine
  MOD_RES 7: note = 4-(2-aminoethoxy)-L-phenylalanine
  MOD_RES 8: note = 3-(2-naphthyl)-L-alanine
  MOD_RES 9: note = 2-methyl-lysine
  MOD_RES 10: note = N6-acetyl-L-lysine
  MOD_RES 13: note = N-methyl-D-tyrosine
XNTWKXXXKKNLX

SEQ ID NO: 7 - protein, 13 aa, synthetic construct
  SITE 1: note = N-terminal acetyl
  SITE 13: note = C-terminal amidyl
  MOD_RES 1: note = L-penicillamine
  MOD_RES 6: note = L-penicillamine
  MOD_RES 4: note = 7-methyl-L-tryptophan
  MOD_RES 5: note = N6-acetyl-L-lysine
  MOD_RES 7: note = 4-(2-aminoethoxy)-L-phenylalanine
  MOD_RES 8: note = 3-(2-naphthyl)-L-alanine
  MOD_RES 9: note = 2-methyl-lysine
  MOD_RES 10: note = N6-acetyl-L-lysine
  MOD_RES 13: note = N-methyl-D-tyrosine
XNTWKXXXKKNFX

SEQ ID NO: 8 - protein, 13 aa, synthetic construct
  SITE 1: note = N-terminal acetyl
  SITE 13: note = C-terminal amidyl
  MOD_RES 1: note = L-penicillamine
  MOD_RES 6: note = L-penicillamine
  MOD_RES 4: note = 7-methyl-L-tryptophan
  MOD_RES 5: note = N6-acetyl-L-lysine
  MOD_RES 10: note = N6-acetyl-L-lysine
  MOD_RES 7: note = 4-(2-aminoethoxy)-L-phenylalanine
  MOD_RES 8: note = 3-(2-naphthyl)-L-alanine
  MOD_RES 9: note = 2-methyl-lysine
  MOD_RES 13: note = N-methyl-D-tyrosine
XNTWKXXXKKNHX

SEQ ID NO: 9 - protein, 14 aa, synthetic construct
  SITE 1: note = N-terminal acetyl
  SITE 1: note = D-Arginine
  SITE 14: note = C-terminal amidyl
  MOD_RES 2: note = L-penicillamine
  MOD_RES 7: note = L-penicillamine
  MOD_RES 5: note = 7-methyl-L-tryptophan
  MOD_RES 6: note = N6-acetyl-L-lysine
  MOD_RES 8: note = 4-(2-aminoethoxy)-L-phenylalanine
  MOD_RES 9: note = 3-(2-naphthyl)-L-alanine
  MOD_RES 10: note = 2-methyl-lysine
  MOD_RES 14: note = N-methyl-D-tyrosine
RXNTWKXXXKENHX

SEQ ID NO: 10 - protein, 13 aa, synthetic construct
  SITE 1: note = N-terminal acetyl
  SITE 13: note = C-terminal amidyl
  MOD_RES 1: note = L-penicillamine
  MOD_RES 6: note = L-penicillamine
  MOD_RES 4: note = 7-methyl-L-tryptophan
  MOD_RES 5: note = N6-acetyl-L-lysine
  MOD_RES 10: note = N6-acetyl-L-lysine
  MOD_RES 7: note = 4-(2-aminoethoxy)-L-phenylalanine
  MOD_RES 8: note = 3-(2-naphthyl)-L-alanine
  MOD_RES 9: note = 2-methyl-lysine
  MOD_RES 12: note = (S)-2-amino-3-(4-(aminomethyl)phenyl)propanoic acid
  SITE 13: note = N-methyl-D-tyrosine
  MOD_RES 13: note = N-methyl-D-tyrosine
XNTWKXXXKKNXX

SEQ ID NO: 11 - protein, 14 aa, synthetic construct
  SITE 1: note = N-terminal acetyl
  SITE 1: note = D-Arginine
  SITE 13: note = D-histidine
  SITE 14: note = C-terminal amidyl
  MOD_RES 2: note = L-penicillamine
  MOD_RES 7: note = L-penicillamine
  MOD_RES 5: note = 7-methyl-L-tryptophan
  MOD_RES 6: note = N6-acetyl-L-lysine
  MOD_RES 8: note = 4-(2-aminoethoxy)-L-phenylalanine
  MOD_RES 9: note = 3-(2-naphthyl)-L-alanine
  MOD_RES 10: note = 4-aminotetrahydro-2H-pyran-4-carboxylic acid
  MOD_RES 14: note = N-methyl-D-tyrosine
  SITE 14: note = N-methyl-D-tyrosine
RXNTWKXXXXENHX

SEQ ID NO: 12 - protein, 14 aa, synthetic construct
  SITE 1: note = N-terminal acetyl
  SITE 1: note = D-Arginine
  SITE 14: note = C-terminal amidyl
  MOD_RES 2: note = L-penicillamine
  MOD_RES 7: note = L-penicillamine
  MOD_RES 5: note = 7-methyl-L-tryptophan
  MOD_RES 6: note = N6-acetyl-L-lysine
  MOD_RES 8: note = 4-(2-aminoethoxy)-L-phenylalanine
  MOD_RES 9: note = 3-(2-naphthyl)-L-alanine
  MOD_RES 10: note = 4-aminotetrahydro-2H-pyran-4-carboxylic acid
  MOD_RES 14: note = N-methyl-D-tyrosine
  SITE 14: note = N-methyl-D-tyrosine
RXNTWKXXXXENNX

SEQ ID NO: 13 - protein, 13 aa, synthetic construct
  SITE 1: note = N-terminal acetyl
  SITE 13: note = C-terminal amidyl
  MOD_RES 1: note = L-penicillamine
  MOD_RES 6: note = L-penicillamine
  MOD_RES 4: note = 7-methyl-L-tryptophan
  MOD_RES 5: note = N6-acetyl-L-lysine
  MOD_RES 7: note = 4-(2-aminoethoxy)-L-phenylalanine
  MOD_RES 8: note = 3-(2-naphthyl)-L-alanine
  MOD_RES 9: note = 2-methyl-lysine
  MOD_RES 10: note = N6-acetyl-L-lysine
  MOD_RES 13: note = N-methyl-D-tyrosine
  SITE 13: note = N-methyl-D-tyrosine
XNTWKXXXKKNNX

SEQ ID NO: 14 - protein, 13 aa, synthetic construct
  SITE 1: note = N-terminal acetyl
  SITE 12: note = D-valine
  SITE 13: note = C-terminal amidyl
  MOD_RES 1: note = L-penicillamine
  MOD_RES 6: note = L-penicillamine
  MOD_RES 4: note = 7-methyl-L-tryptophan
  MOD_RES 5: note = N6-acetyl-L-lysine
  MOD_RES 10: note = N6-acetyl-L-lysine
  MOD_RES 7: note = 4-(2-aminoethoxy)-L-phenylalanine
  MOD_RES 8: note = 3-(2-naphthyl)-L-alanine
  MOD_RES 9: note = 2-methyl-lysine
  MOD_RES 13: note = N-methyl-D-tyrosine
  SITE 13: note = N-methyl-D-tyrosine
XNTWKXXXKKNVX

SEQ ID NO: 15 - protein, 13 aa, synthetic construct
  SITE 1: note = N-terminal acetyl
  SITE 12: note = D-threonine
  SITE 13: note = C-terminal amidyl
  MOD_RES 1: note = L-penicillamine
  MOD_RES 6: note = L-penicillamine
  MOD_RES 4: note = 7-methyl-L-tryptophan
  MOD_RES 5: note = N6-acetyl-L-lysine
  MOD_RES 7: note = 4-(2-aminoethoxy)-L-phenylalanine
  MOD_RES 8: note = 3-(2-naphthyl)-L-alanine
  MOD_RES 9: note = 2-methyl-lysine
  MOD_RES 10: note = N6-acetyl-L-lysine
  MOD_RES 13: note = N-methyl-D-tyrosine
  SITE 13: note = N-methyl-D-tyrosine
XNTWKXXXKKNTX

SEQ ID NO: 16 - protein, 14 aa, synthetic construct
  SITE 1: note = N-terminal acetyl
  SITE 1: note = D-Arginine
  SITE 13: note = D-lysine
  SITE 14: note = C-terminal amidyl
  MOD_RES 2: note = L-penicillamine
  MOD_RES 7: note = L-penicillamine
  MOD_RES 5: note = 7-methyl-L-tryptophan
  MOD_RES 6: note = (S)-2-amino-5-ureidopentanoic acid
  MOD_RES 8: note = 4-(2-aminoethoxy)-L-phenylalanine
  MOD_RES 9: note = 3-(2-naphthyl)-L-alanine
  MOD_RES 10: note = 2-methyl-leucine
  MOD_RES 14: note = N-methyl-D-tyrosine
  SITE 14: note = N-methyl-D-tyrosine
RXNTWXXXXLENKX

SEQ ID NO: 17 - protein, 14 aa, synthetic construct
  SITE 1: note = N-terminal acetyl
  SITE 1: note = D-Arginine
  SITE 13: note = D-histidine
  SITE 14: note = C-terminal amidyl
  MOD_RES 2: note = L-penicillamine
  MOD_RES 7: note = L-penicillamine
  MOD_RES 5: note = 7-methyl-L-tryptophan
  MOD_RES 6: note = (S)-2-amino-5-ureidopentanoic acid
  MOD_RES 8: note = 4-(2-aminoethoxy)-L-phenylalanine
  MOD_RES 9: note = 3-(2-naphthyl)-L-alanine
  MOD_RES 10: note = 2-methyl-leucine
  MOD_RES 14: note = N-methyl-D-tyrosine
  SITE 14: note = N-methyl-D-tyrosine
RXNTWXXXXLENHX

SEQ ID NO: 18 - protein, 13 aa, synthetic construct
  SITE 1: note = N-terminal acetyl
  SITE 13: note = C-terminal amidyl
  MOD_RES 1: note = L-penicillamine
  MOD_RES 6: note = L-penicillamine
  MOD_RES 4: note = 7-methyl-L-tryptophan
  MOD_RES 5: note = N6-acetyl-L-lysine
  MOD_RES 10: note = N6-acetyl-L-lysine
  MOD_RES 7: note = 4-(2-aminoethoxy)-L-phenylalanine
  MOD_RES 8: note = 3-(2-naphthyl)-L-alanine
  MOD_RES 9: note = 2-methyl-lysine
  MOD_RES 13: note = N-methyl-D-tyrosine
  SITE 13: note = N-methyl-D-tyrosine
  SITE 12: note = Orn
XNTWKXXXKKNXX

SEQ ID NO: 19 - protein, 13 aa, synthetic construct
  SITE 1: note = N-terminal acetyl
  SITE 13: note = C-terminal amidyl
  MOD_RES 1: note = L-penicillamine
  MOD_RES 6: note = L-penicillamine
  MOD_RES 4: note = 7-methyl-L-tryptophan
  MOD_RES 5: note = N6-acetyl-L-lysine
  MOD_RES 10: note = N6-acetyl-L-lysine
  MOD_RES 7: note = 4-(2-aminoethoxy)-L-phenylalanine
  MOD_RES 8: note = 3-(2-naphthyl)-L-alanine
  MOD_RES 9: note = 2-methyl-lysine
  MOD_RES 13: note = N-methyl-D-tyrosine
  SITE 12: note = D-serine
  SITE 13: note = N-methyl-D-tyrosine
XNTWKXXXKKNSX

SEQ ID NO: 20 - protein, 13 aa, synthetic construct
  SITE 1: note = N-terminal acetyl
  SITE 12: note = D-phenylalanine
  SITE 13: note = C-terminal amidyl
  MOD_RES 1: note = L-penicillamine
  MOD_RES 6: note = L-penicillamine
  MOD_RES 4: note = 7-methyl-L-tryptophan
  MOD_RES 5: note = N6-acetyl-L-lysine
  MOD_RES 10: note = N6-acetyl-L-lysine
  MOD_RES 7: note = 4-(2-aminoethoxy)-L-phenylalanine
  MOD_RES 8: note = 3-(2-naphthyl)-L-alanine
  MOD_RES 9: note = 2-methyl-lysine
  MOD_RES 13: note = N-methyl-D-tyrosine
  SITE 13: note = N-methyl-D-tyrosine
XNTWKXXXKKNFX

SEQ ID NO: 21 - protein, 13 aa, synthetic construct
  SITE 1: note = N-terminal acetyl
  SITE 12: note = D-lysine
  SITE 13: note = C-terminal amidyl
  MOD_RES 1: note = L-penicillamine
  MOD_RES 6: note = L-penicillamine
  MOD_RES 4: note = 7-methyl-L-tryptophan
  MOD_RES 7: note = 4-(2-aminoethoxy)-L-phenylalanine
  MOD_RES 8: note = 3-(2-naphthyl)-L-alanine
  MOD_RES 9: note = 2-methyl-lysine
  MOD_RES 10: note = N6-acetyl-L-lysine
  MOD_RES 13: note = N-methyl-D-tyrosine
  SITE 13: note = N-methyl-D-tyrosine
XNTWYXXXKKNKX

SEQ ID NO: 22 - protein, 13 aa, synthetic construct
  SITE 1: note = N-terminal acetyl
  SITE 12: note = D-lysine
  SITE 13: note = C-terminal amidyl
  MOD_RES 1: note = L-penicillamine
  MOD_RES 6: note = L-penicillamine
  MOD_RES 4: note = 7-methyl-L-tryptophan
  MOD_RES 5: note = 4-(Aminomethyl)-L-phenylalanine
  MOD_RES 7: note = 4-(2-aminoethoxy)-L-phenylalanine
  MOD_RES 8: note = 3-(2-naphthyl)-L-alanine
  MOD_RES 9: note = 2-methyl-lysine
  MOD_RES 10: note = N6-acetyl-L-lysine
  MOD_RES 13: note = N-methyl-D-tyrosine
  SITE 13: note = N-methyl-D-tyrosine
XNTWXXXXKKNKX

SEQ ID NO: 23 - protein, 13 aa, synthetic construct
  SITE 1: note = N-terminal acetyl
  SITE 12: note = D-lysine
  SITE 13: note = C-terminal amidyl
  MOD_RES 1: note = L-penicillamine
  MOD_RES 6: note = L-penicillamine
  MOD_RES 4: note = 7-methyl-L-tryptophan
  MOD_RES 5: note = (S)-2-amino-3-(4-(aminomethyl)phenyl)propanoic acid
  MOD_RES 7: note = 4-(2-aminoethoxy)-L-phenylalanine
  MOD_RES 8: note = 3-(2-naphthyl)-L-alanine
  MOD_RES 9: note = 2-methyl-lysine
  MOD_RES 10: note = N6-acetyl-L-lysine
  MOD_RES 13: note = N-methyl-D-tyrosine
  SITE 13: note = N-methyl-D-tyrosine
XNTWXXXXKKNKX

SEQ ID NO: 24 - protein, 13 aa, synthetic construct
  SITE 1: note = N-terminal acetyl
  SITE 12: note = D-tryptophan
  SITE 13: note = C-terminal amidyl
  MOD_RES 1: note = L-penicillamine
  MOD_RES 6: note = L-penicillamine
  MOD_RES 4: note = 7-methyl-L-tryptophan
  MOD_RES 5: note = N6-acetyl-L-lysine
  MOD_RES 10: note = N6-acetyl-L-lysine
  MOD_RES 7: note = 4-(2-aminoethoxy)-L-phenylalanine
  MOD_RES 8: note = 3-(2-naphthyl)-L-alanine
  MOD_RES 9: note = 2-methyl-lysine
  MOD_RES 13: note = N-methyl-D-tyrosine
  SITE 13: note = N-methyl-D-tyrosine
XNTWKXXXKKNGX

SEQ ID NO: 25 - protein, 13 aa, synthetic construct
  SITE 1: note = N-terminal acetyl
  SITE 12: note = D-lysine
  SITE 13: note = C-terminal amidyl
  MOD_RES 1: note = L-penicillamine
  MOD_RES 6: note = L-penicillamine
  MOD_RES 4: note = 7-methyl-L-tryptophan
  MOD_RES 5: note = (S)-2-amino-5-ureidopentanoic acid
  MOD_RES 7: note = 4-(2-aminoethoxy)-L-phenylalanine
  MOD_RES 8: note = 3-(2-naphthyl)-L-alanine
  MOD_RES 9: note = 2-methyl-leucine
  MOD_RES 10: note = N6-acetyl-L-lysine
  MOD_RES 13: note = N-methyl-D-tyrosine
  SITE 13: note = N-methyl-D-tyrosine
XNTWXXXXLKNKX

SEQ ID NO: 26 - protein, 13 aa, synthetic construct
  SITE 1: note = N-terminal acetyl
  SITE 12: note = D-histidine
  SITE 13: note = C-terminal amidyl
  MOD_RES 1: note = L-penicillamine
  MOD_RES 6: note = L-penicillamine
  MOD_RES 4: note = 7-methyl-L-tryptophan
  MOD_RES 5: note = N6-acetyl-L-lysine
  MOD_RES 10: note = N6-acetyl-L-lysine
  MOD_RES 7: note = 4-(2-aminoethoxy)-L-phenylalanine
  MOD_RES 8: note = 3-(2-naphthyl)-L-alanine
  MOD_RES 9: note = 2-methyl-lysine
  MOD_RES 13: note = N-methyl-D-tyrosine
  SITE 13: note = N-methyl-D-tyrosine
XNTWKXXXKKNHX

SEQ ID NO: 27 - protein, 13 aa, synthetic construct
  SITE 1: note = N-terminal acetyl
  SITE 13: note = C-terminal amidyl
  MOD_RES 1: note = L-penicillamine
  MOD_RES 6: note = L-penicillamine
  MOD_RES 4: note = 7-methyl-L-tryptophan
  MOD_RES 5: note = N6-acetyl-L-lysine
  MOD_RES 7: note = 4-(2-aminoethoxy)-L-phenylalanine
  MOD_RES 8: note = 3-(2-naphthyl)-L-alanine
  MOD_RES 9: note = 2-methyl-lysine
  MOD_RES 10: note = N6-acetyl-L-lysine
  MOD_RES 12: note = bAla
  MOD_RES 13: note = N-methyl-D-tyrosine
  SITE 13: note = N-methyl-D-tyrosine
XNTWKXXXKKNAX

SEQ ID NO: 28 - protein, 13 aa, synthetic construct
  SITE 1: note = N-terminal acetyl
  SITE 13: note = C-terminal amidyl
  MOD_RES 1: note = L-penicillamine
  MOD_RES 6: note = L-penicillamine
  MOD_RES 4: note = 7-methyl-L-tryptophan
  MOD_RES 5: note = N6-acetyl-L-lysine
  MOD_RES 10: note = N6-acetyl-L-lysine
  MOD_RES 7: note = 4-(2-aminoethoxy)-L-phenylalanine
  MOD_RES 8: note = 3-(2-naphthyl)-L-alanine
  MOD_RES 9: note = 2-methyl-lysine
  MOD_RES 12: note = bAla
  MOD_RES 13: note = N-methyl-D-tyrosine
  SITE 13: note = N-methyl-D-tyrosine
XNTWKXXXKKNAX

SEQ ID NO: 29 - protein, 13 aa, synthetic construct
  SITE 1: note = N-terminal acetyl
  SITE 13: note = C-terminal amidyl
  MOD_RES 1: note = L-penicillamine
  MOD_RES 6: note = L-penicillamine
  MOD_RES 4: note = 7-methyl-L-tryptophan
  MOD_RES 5: note = N6-acetyl-L-lysine
  MOD_RES 10: note = N6-acetyl-L-lysine
  MOD_RES 7: note = 4-(2-aminoethoxy)-L-phenylalanine
  MOD_RES 8: note = 3-(2-naphthyl)-L-alanine
  MOD_RES 9: note = 2-methyl-lysine
  MOD_RES 12: note = bAla
  MOD_RES 13: note = N-methyl-D-tyrosine
  SITE 13: note = N-methyl-D-tyrosine
XNTWKXXXKKNAX

SEQ ID NO: 30 - protein, 13 aa, synthetic construct
  SITE 1: note = N-terminal acetyl
  SITE 13: note = C-terminal amidyl
  MOD_RES 1: note = L-penicillamine
  MOD_RES 6: note = L-penicillamine
  MOD_RES 4: note = 7-methyl-L-tryptophan
  MOD_RES 5: note = N6-acetyl-L-lysine
  MOD_RES 10: note = N6-acetyl-L-lysine
  MOD_RES 7: note = 4-(2-aminoethoxy)-L-phenylalanine
  MOD_RES 8: note = 3-(2-naphthyl)-L-alanine
  MOD_RES 9: note = 2-methyl-lysine
  MOD_RES 12: note = 3-(3-Pyridyl)-L-alanine
  MOD_RES 13: note = N-methyl-D-tyrosine
  SITE 13: note = N-methyl-D-tyrosine
XNTWKXXXKKNXX

SEQ ID NO: 31 - protein, 12 aa, synthetic construct
  SITE 1: note = N-terminal acetyl
  SITE 12: note = C-terminal amidyl
  MOD_RES 1: note = L-penicillamine
  MOD_RES 6: note = L-penicillamine
  MOD_RES 4: note = 7-methyl-L-tryptophan
  MOD_RES 5: note = N6-acetyl-L-lysine
  MOD_RES 10: note = N6-acetyl-L-lysine
  MOD_RES 7: note (S)-2-amino-3-(4-(2-(dimethylamino)ethoxy)phenyl)propanoic acid
  MOD_RES 8: note = 3-(2-naphthyl)-L-alanine
  MOD_RES 9: note = 2-methyl-lysine
  MOD_RES 12: note = 4-aminotetrahydro-2H-pyran-4-carboxylic acid
XNTWKXXXKKNX

SEQ ID NO: 32 - protein, 13 aa, synthetic construct
  SITE 1: note = N-terminal acetyl
  SITE 13: note = C-terminal amidyl
  MOD_RES 1: note = L-penicillamine
  MOD_RES 6: note = L-penicillamine
  MOD_RES 4: note = 7-methyl-L-tryptophan
  MOD_RES 5: note = N6-acetyl-L-lysine
  MOD_RES 10: note = N6-acetyl-L-lysine
  MOD_RES 7: note = 4-(2-aminoethoxy)-L-phenylalanine
  MOD_RES 8: note = 3-(2-naphthyl)-L-alanine
  MOD_RES 9: note = 2-methyl-lysine
  MOD_RES 12: note = 3-(3-Pyridyl)-L-alanine
  MOD_RES 13: note = N-methyl-D-tyrosine
  SITE 13: note = N-methyl-D-tyrosine
XNTWKXXXKKNXX

SEQ ID NO: 33 - protein, 12 aa, synthetic construct
  SITE 1: note = N-terminal acetyl
  SITE 12: note = C-terminal amidyl
  MOD_RES 1: note = L-penicillamine
  MOD_RES 6: note = L-penicillamine
  MOD_RES 4: note = 7-methyl-L-tryptophan
  MOD_RES 5: note = N6-acetyl-L-lysine
  MOD_RES 10: note = N6-acetyl-L-lysine
  MOD_RES 7: note = 4-(2-aminoethoxy)-L-phenylalanine
  MOD_RES 8: note = 3-(2-naphthyl)-L-alanine
  MOD_RES 9: note = 2-methyl-lysine
  MOD_RES 12: note = N-methyl-D-tyrosine
  SITE 12: note = N-methyl-D-tyrosine
XNTWKXXXKKNX

SEQ ID NO: 34 - protein, 13 aa, synthetic construct
  SITE 1: note = N-terminal acetyl
  SITE 1: note = D-Arginine
  SITE 13: note = C-terminal amidyl
  MOD_RES 2: note = L-penicillamine
  MOD_RES 7: note = L-penicillamine
  MOD_RES 5: note = 7-methyl-L-tryptophan
  MOD_RES 6: note = N6-acetyl-L-lysine
  MOD_RES 8: note = 4-(2-aminoethoxy)-L-phenylalanine
  MOD_RES 9: note = 3-(2-naphthyl)-L-alanine
  MOD_RES 10: note = 4-aminotetrahydro-2H-pyran-4-carboxylic acid
  MOD_RES 13: note = N-methyl-D-tyrosine
  SITE 13: note = N-methyl-D-tyrosine
RXNTWKXXXXENX

SEQ ID NO: 35 - protein, 14 aa, synthetic construct
  SITE 1: note = N-terminal acetyl
  SITE 1: note = D-Arginine
  SITE 14: note = N-methyl-D-tyrosine
  SITE 14: note = C-terminal amidyl
  MOD_RES 2: note = L-penicillamine
  MOD_RES 7: note = L-penicillamine
  MOD_RES 5: note = 7-methyl-L-tryptophan
  MOD_RES 6: note = N6-acetyl-L-lysine
  MOD_RES 8: note = 4-(2-aminoethoxy)-L-phenylalanine
  MOD_RES 9: note = 3-(2-naphthyl)-L-alanine
  MOD_RES 10: note = 4-aminotetrahydro-2H-pyran-4-carboxylic acid
  MOD_RES 13: note = 3-(3-Pyridyl)-L-alanine
RXNTWKXXXXENXX

SEQ ID NO: 36 - protein, 13 aa, synthetic construct
  SITE 1: note = N-terminal acetyl
  SITE 1: note = D-Arginine
  SITE 13: note = C-terminal amidyl
  MOD_RES 2: note = L-penicillamine
  MOD_RES 7: note = L-penicillamine
  MOD_RES 5: note = 7-methyl-L-tryptophan
  MOD_RES 6: note = N6-acetyl-L-lysine
  MOD_RES 8: note = 4-(2-aminoethoxy)-L-phenylalanine
  MOD_RES 9: note = 3-(2-naphthyl)-L-alanine
  MOD_RES 10: note = 4-aminotetrahydro-2H-pyran-4-carboxylic acid
  MOD_RES 13: note = (S)-2-(methylamino)-3-(pyridin-3-yl)propanoic acid
RXNTWKXXXXENX

SEQ ID NO: 37 - protein, 14 aa, synthetic construct
  SITE 1: note = N-terminal 2-oxo-6,9,12,15,18,21-hexaoxa-3-azatetracosan-24-oyl
  SITE 1: note = D-Arginine
  SITE 14: note = C-terminal amidyl
  MOD_RES 2: note = L-penicillamine
  MOD_RES 7: note = L-penicillamine
  MOD_RES 5: note = 7-methyl-L-tryptophan
  MOD_RES 6: note = N6-acetyl-L-lysine
  MOD_RES 8: note = 4-(2-aminoethoxy)-L-phenylalanine
  MOD_RES 9: note = 3-(2-naphthyl)-L-alanine
  MOD_RES 10: note = 4-aminotetrahydro-2H-pyran-4-carboxylic acid
  MOD_RES 13: note = 3-(3-Pyridyl)-L-alanine
  MOD_RES 14: note = MeGly
RXNTWKXXXXENXX

SEQ ID NO: 38 - protein, 14 aa, synthetic construct
  SITE 1: note = N-terminal 2-oxo-6,9,12,15,18,21-dodecaoxa-3-azatetracosan-24-oyl
  SITE 1: note = D-Arginine
  SITE 14: note = C-terminal amidyl
  MOD_RES 2: note = L-penicillamine
  MOD_RES 7: note = L-penicillamine
  MOD_RES 5: note = 7-methyl-L-tryptophan
  MOD_RES 6: note = N6-acetyl-L-lysine
  MOD_RES 8: note = 4-(2-aminoethoxy)-L-phenylalanine
  MOD_RES 9: note = 3-(2-naphthyl)-L-alanine
  MOD_RES 10: note = 4-aminotetrahydro-2H-pyran-4-carboxylic acid
  MOD_RES 13: note = 3-(3-Pyridyl)-L-alanine
  MOD_RES 14: note = MeGly
RXNTWKXXXXENXX

SEQ ID NO: 39 - protein, 14 aa, synthetic construct
  SITE 1: note = N-terminal acetyl
  SITE 14: note = C-terminal amidyl
  MOD_RES 1: note (R)-30-amino-2,24-dioxo-6,9,12,15,18,21-hexaoxa-3,25-diazah entriacontan-31-oic acid
  MOD_RES 2: note = L-penicillamine
  MOD_RES 7: note = L-penicillamine
  MOD_RES 5: note = 7-methyl-L-tryptophan
  MOD_RES 6: note = N6-acetyl-L-lysine
  MOD_RES 11: note = N6-acetyl-L-lysine
  MOD_RES 8: note = 4-(2-aminoethoxy)-L-phenylalanine
  MOD_RES 9: note = 3-(2-naphthyl)-L-alanine
  MOD_RES 10: note = 4-aminotetrahydro-2H-pyran-4-carboxylic acid
  MOD_RES 13: note = 3-(3-Pyridyl)-L-alanine
  MOD_RES 14: note = MeGly
XXNTWKXXXXKNXX

SEQ ID NO: 40 - protein, 14 aa, synthetic construct
  SITE 1: note = N-terminal acetyl
  SITE 14: note = C-terminal amidyl
  MOD_RES 1: note (S)-49-amino-2,43-dioxo-6,9,12,15,18,21,24,27,30,33,36,39-d odecaoxa-3,44-diazapentacontan-50-oic acid
  MOD_RES 2: note = L-penicillamine
  MOD_RES 7: note = L-penicillamine
  MOD_RES 5: note = 7-methyl-L-tryptophan
  MOD_RES 6: note = N6-acetyl-L-lysine
  MOD_RES 11: note = N6-acetyl-L-lysine
  MOD_RES 8: note = 4-(2-aminoethoxy)-L-phenylalanine
  MOD_RES 9: note = 3-(2-naphthyl)-L-alanine
  MOD_RES 10: note = 4-aminotetrahydro-2H-pyran-4-carboxylic acid
  MOD_RES 13: note = 3-(3-Pyridyl)-L-alanine
  MOD_RES 14: note = MeGly
XXNTWKXXXXKNXX

SEQ ID NO: 41 - protein, 13 aa, synthetic construct
  SITE 1: note = N-terminal acetyl
  SITE 13: note = C-terminal amidyl
  MOD_RES 1: note = L-penicillamine
  MOD_RES 6: note = L-penicillamine
  MOD_RES 4: note = 7-methyl-L-tryptophan
  MOD_RES 5: note = N6-acetyl-L-lysine
  MOD_RES 7: note = 4-(2-aminoethoxy)-L-phenylalanine
  MOD_RES 8: note = 3-(2-naphthyl)-L-alanine
  MOD_RES 9: note = 4-aminotetrahydro-2H-pyran-4-carboxylic acid
  MOD_RES 10: note (R)-30-amino-2,24-dioxo-6,9,12,15,18,21-hexaoxa-3,25-diazah entriacontan-31-oic acid
  MOD_RES 12: note = 3-(3-Pyridyl)-L-alanine
  MOD_RES 13: note = MeGly
XNTWKXXXXXNXX

SEQ ID NO: 42 - protein, 13 aa, synthetic construct
  SITE 1: note = N-terminal acetyl
  SITE 13: note = C-terminal amidyl
  MOD_RES 1: note = L-penicillamine
  MOD_RES 6: note = L-penicillamine
  MOD_RES 4: note = 7-methyl-L-tryptophan
  MOD_RES 5: note = N6-acetyl-L-lysine
  MOD_RES 7: note = 4-(2-aminoethoxy)-L-phenylalanine
  MOD_RES 8: note = 3-(2-naphthyl)-L-alanine
  MOD_RES 9: note = 4-aminotetrahydro-2H-pyran-4-carboxylic acid
  MOD_RES 10: note (S)-49-amino-2,43-dioxo-6,9,12,15,18,21,24,27,30,33,36,39-d odecaoxa-3,44-diazapentacontan-50-oic acid
  MOD_RES 12: note = 3-(3-Pyridyl)-L-alanine
  MOD_RES 13: note = MeGly
XNTWKXXXXXNXX

SEQ ID NO: 43 - protein, 14 aa, synthetic construct
  SITE 1: note = N-terminal 2-oxo-6,9,12,15,18,21-nonaoxa-3-azatetracosan-24-oyl
  SITE 1: note = D-Arginine
  SITE 14: note = C-terminal amidyl
  MOD_RES 2: note = L-penicillamine
  MOD_RES 7: note = L-penicillamine
  MOD_RES 5: note = 7-methyl-L-tryptophan
  MOD_RES 6: note = N6-acetyl-L-lysine
  MOD_RES 10: note = 4-aminotetrahydro-2H-pyran-4-carboxylic acid
  MOD_RES 8: note = 4-(2-aminoethoxy)-L-phenylalanine
  MOD_RES 9: note = 3-(2-naphthyl)-L-alanine
  MOD_RES 13: note = 3-(3-Pyridyl)-L-alanine
  MOD_RES 14: note = MeGly
RXNTWKXXXXENXX

SEQ ID NO: 44 - protein, 14 aa, synthetic construct
  SITE 1: note = N-terminal acetyl
  SITE 14: note = C-terminal amidyl
  MOD_RES 1: note (R)-39-amino-2,33-dioxo-6,9,12,15,18,21,24,27,30-nonaoxa-3, 34-diazatetracontan-40-oic acid
  MOD_RES 2: note = L-penicillamine
  MOD_RES 7: note = L-penicillamine
  MOD_RES 5: note = 7-methyl-L-tryptophan
  MOD_RES 6: note = N6-acetyl-L-lysine
  MOD_RES 11: note = N6-acetyl-L-lysine
  MOD_RES 8: note = 4-(2-aminoethoxy)-L-phenylalanine
  MOD_RES 9: note = 3-(2-naphthyl)-L-alanine
  MOD_RES 10: note = 4-aminotetrahydro-2H-pyran-4-carboxylic acid
  MOD_RES 13: note = 3-(3-Pyridyl)-L-alanine
  MOD_RES 14: note = MeGly
XXNTWKXXXXKNXX

SEQ ID NO: 45 - protein, 13 aa, synthetic construct
  SITE 1: note = N-terminal acetyl
  SITE 13: note = C-terminal amidyl
  MOD_RES 1: note = L-penicillamine
  MOD_RES 6: note = L-penicillamine
  MOD_RES 4: note = 7-methyl-L-tryptophan
  MOD_RES 5: note = N6-acetyl-L-lysine
  MOD_RES 7: note = 4-(2-aminoethoxy)-L-phenylalanine
  MOD_RES 8: note = 3-(2-naphthyl)-L-alanine
  MOD_RES 9: note = 4-aminotetrahydro-2H-pyran-4-carboxylic acid
  MOD_RES 10: note (R)-39-amino-2,33-dioxo-6,9,12,15,18,21,24,27,30-nonaoxa-3, 34-diazatetracontan-40-oic acid
  MOD_RES 12: note = 3-(3-Pyridyl)-L-alanine
  MOD_RES 13: note = MeGly
XNTWKXXXXXNXX

SEQ ID NO: 46 - protein, 13 aa, synthetic construct
  SITE 1: note = N-terminal acetyl
  SITE 13: note = C-terminal amidyl
  MOD_RES 1: note = L-penicillamine
  MOD_RES 6: note = L-penicillamine
  MOD_RES 2: note = N4-methyl-L-asparagine
  MOD_RES 4: note = 7-methyl-L-tryptophan
  MOD_RES 5: note = N6-acetyl-L-lysine
  MOD_RES 10: note = N6-acetyl-L-lysine
  MOD_RES 7: note = 4-(2-aminoethoxy)-L-phenylalanine
  MOD_RES 8: note = 3-(2-naphthyl)-L-alanine
  MOD_RES 9: note = 4-aminotetrahydro-2H-pyran-4-carboxylic acid
  MOD_RES 12: note = 3-(3-Pyridyl)-L-alanine
  MOD_RES 13: note = MeGly
XNTWKXXXXKNXX

SEQ ID NO: 47 - protein, 13 aa, synthetic construct
  SITE 1: note = N-terminal acetyl
  SITE 13: note = C-terminal amidyl
  MOD_RES 1: note = L-penicillamine
  MOD_RES 6: note = L-penicillamine
  MOD_RES 4: note = 7-methyl-L-tryptophan
  MOD_RES 5: note = N6-acetyl-L-lysine
  MOD_RES 10: note = N6-acetyl-L-lysine
  MOD_RES 7: note (S)-2-amino-3-(4-(2-(methylamino)ethoxy)phenyl)propanoic acid
  MOD_RES 8: note = 3-(2-naphthyl)-L-alanine
  MOD_RES 9: note = 4-aminotetrahydro-2H-pyran-4-carboxylic acid
  MOD_RES 12: note = 3-(3-Pyridyl)-L-alanine
  MOD_RES 13: note = MeGly
XNTWKXXXXKNXX

SEQ ID NO: 48 - protein, 13 aa, synthetic construct
  SITE 1: note = N-terminal acetyl
  SITE 13: note = C-terminal amidyl
  MOD_RES 1: note = L-penicillamine
  MOD_RES 6: note = L-penicillamine
  MOD_RES 4: note = 7-methyl-L-tryptophan
  MOD_RES 5: note = N6-acetyl-L-lysine
  MOD_RES 10: note = N6-acetyl-L-lysine
  MOD_RES 7: note = 4-(2-aminoethoxy)-L-phenylalanine
  MOD_RES 8: note = 3-(2-naphthyl)-L-alanine
  MOD_RES 9: note = 4-aminotetrahydro-2H-pyran-4-carboxylic acid
  MOD_RES 11: note = N4-methyl-L-asparagine
  MOD_RES 12: note = 3-(3-Pyridyl)-L-alanine
  MOD_RES 13: note = MeGly
XNTWKXXXXKXXX

SEQ ID NO: 49 - protein, 13 aa, synthetic construct
  SITE 1: note = N-terminal 2,2,2-Trifluoroethanoyl
  SITE 13: note = C-terminal amidyl
  MOD_RES 1: note = L-penicillamine
  MOD_RES 6: note = L-penicillamine
  MOD_RES 4: note = 7-methyl-L-tryptophan
  MOD_RES 5: note = N6-acetyl-L-lysine
  MOD_RES 10: note = N6-acetyl-L-lysine
  MOD_RES 7: note = 4-(2-aminoethoxy)-L-phenylalanine
  MOD_RES 8: note = 3-(2-naphthyl)-L-alanine
  MOD_RES 9: note = 4-aminotetrahydro-2H-pyran-4-carboxylic acid
  MOD_RES 12: note = 3-(3-Pyridyl)-L-alanine
  MOD_RES 13: note = MeGly
XNTWKXXXXKNXX

SEQ ID NO: 50 - protein, 13 aa, synthetic construct
  SITE 1: note = N-terminal 2,2,2-Trifluoroethanoyl
  SITE 13: note = C-terminal amidyl
  MOD_RES 1: note = L-penicillamine
  MOD_RES 6: note = L-penicillamine
  MOD_RES 4: note = 7-methyl-L-tryptophan
  MOD_RES 5: note = N6-acetyl-L-lysine
  MOD_RES 10: note = N6-acetyl-L-lysine
  MOD_RES 7: note = 4-(2-aminoethoxy)-L-phenylalanine
  MOD_RES 8: note = 3-(2-naphthyl)-L-alanine
  MOD_RES 9: note = 1-amino-4,4-difluorocyclohexane-1-carboxylic acid
  MOD_RES 12: note = 3-(3-Pyridyl)-L-alanine
  MOD_RES 13: note = MeGly
XNTWKXXXXKNXX

SEQ ID NO: 51 - protein, 13 aa, synthetic construct
  SITE 1: note = N-terminal 2,2,2-Trifluoroethanoyl
  SITE 13: note = C-terminal amidyl
  MOD_RES 1: note = L-penicillamine
  MOD_RES 6: note = L-penicillamine
  MOD_RES 4: note = 7-methyl-L-tryptophan
  MOD_RES 5: note = (S)-2-amino-4-(N-methylacetamido)butanoic acid
  MOD_RES 7: note = 4-(2-aminoethoxy)-L-phenylalanine
  MOD_RES 8: note = 3-(2-naphthyl)-L-alanine
  MOD_RES 9: note = 4-aminotetrahydro-2H-pyran-4-carboxylic acid
  MOD_RES 10: note = N6-acetyl-L-lysine
  MOD_RES 12: note = (S)-3-(2-amino-2-carboxyethyl)-1-methylpyridin-1-ium
  MOD_RES 13: note = MeGly
XNTWXXXXXKNXX

SEQ ID NO: 52 - protein, 13 aa, synthetic construct
  SITE 1: note = N-terminal 2,2,2-Trifluoroethanoyl
  SITE 13: note = C-terminal amidyl
  MOD_RES 1: note = L-penicillamine
  MOD_RES 6: note = L-penicillamine
  MOD_RES 2: note = N4,N4-dimethyl-L-asparagine
  MOD_RES 4: note = 7-methyl-L-tryptophan
  MOD_RES 5: note = N6-acetyl-L-lysine
  MOD_RES 10: note = N6-acetyl-L-lysine
  MOD_RES 7: note = 4-(2-aminoethoxy)-L-phenylalanine
  MOD_RES 8: note = 3-(2-naphthyl)-L-alanine
  MOD_RES 9: note = 4-aminotetrahydro-2H-pyran-4-carboxylic acid
  MOD_RES 12: note = 3-(3-Pyridyl)-L-alanine
  MOD_RES 13: note = MeGly
XNTWKXXXXKNXX

SEQ ID NO: 53 - protein, 13 aa, synthetic construct
  MOD_RES 1: note = L-penicillamine
  MOD_RES 4: note = 7-methyl-L-tryptophan
  MOD_RES 5: note = N6-acetyl-L-lysine
  MOD_RES 6: note = L-penicillamine
  MOD_RES 7: note (S)-2-amino-3-(4-(2-(dimethylamino)ethoxy)phenyl)propanoic acid
  MOD_RES 8: note = 3-(2-naphthyl)-L-alanine
  MOD_RES 9: note = 4-aminotetrahydro-2H-pyran-4-carboxylic acid
  MOD_RES 10: note = N6-acetyl-L-lysine
  MOD_RES 12: note = 3-(3-Pyridyl)-L-alanine
  MOD_RES 13: note = MeGly
  SITE 1: note = N-terminal 2,2,2-Trifluoroethanoyl
  SITE 13: note = C-terminal amidyl
XNTWKXXXXKNXX

SEQ ID NO: 54 - protein, 13 aa, synthetic construct
  MOD_RES 1: note = L-penicillamine
  MOD_RES 4: note = 7-methyl-L-tryptophan
  MOD_RES 5: note = N6-acetyl-L-lysine
  MOD_RES 6: note = L-penicillamine
  MOD_RES 7: note = (S)-2-amino-3-(4-(difluoromethoxy)phenyl)propanoic acid
  MOD_RES 8: note = 3-(2-naphthyl)-L-alanine
  MOD_RES 9: note = 4-aminotetrahydro-2H-pyran-4-carboxylic acid
  MOD_RES 10: note = N6-acetyl-L-lysine
  MOD_RES 12: note = 3-(3-Pyridyl)-L-alanine
  MOD_RES 13: note = MeGly
  SITE 1: note = N-terminal 2,2,2-Trifluoroethanoyl
  SITE 13: note = C-terminal amidyl
XNTWKXXXXKNXX

SEQ ID NO: 55 - protein, 13 aa, synthetic construct
  MOD_RES 1: note = L-penicillamine
  MOD_RES 4: note = 7-methyl-L-tryptophan
  MOD_RES 5: note = N6-acetyl-L-lysine
  MOD_RES 6: note = L-penicillamine
  MOD_RES 7: note = 4-(2-aminoethoxy)-L-phenylalanine
  MOD_RES 8: note = 3-(2-naphthyl)-L-alanine
  MOD_RES 9: note = 4-amino-1-methylpiperidine-4-carboxylic acid
  MOD_RES 10: note = N6-acetyl-L-lysine
  MOD_RES 12: note = 3-(3-Pyridyl)-L-alanine
  MOD_RES 13: note = MeGly
  SITE 13: note = C-terminal amidyl
  SITE 1: note = N-terminal 2,2,2-Trifluoroethanoyl
XNTWKXXXXKNXX

SEQ ID NO: 56 - protein, 13 aa, synthetic construct
  MOD_RES 1: note = L-penicillamine
  MOD_RES 4: note = 7-methyl-L-tryptophan
  MOD_RES 5: note = N6-acetyl-L-lysine
  MOD_RES 6: note = L-penicillamine
  MOD_RES 7: note = 4-(2-aminoethoxy)-L-phenylalanine
  MOD_RES 8: note = 3-(2-naphthyl)-L-alanine
  MOD_RES 9: note = 4-aminotetrahydro-2H-pyran-4-carboxylic acid
  MOD_RES 10: note = N6-acetyl-L-lysine
  MOD_RES 12: note (S)-2-amino-3-(5-(trifluoromethyl)pyridin-3-yl)propanoic acid
  MOD_RES 13: note = MeGly
  SITE 13: note = C-terminal amidyl
  SITE 1: note = N-terminal 2,2,2-Trifluoroethanoyl
XNTWKXXXXKNXX

SEQ ID NO: 57 - protein, 13 aa, synthetic construct
  MOD_RES 1: note = L-penicillamine
  MOD_RES 4: note = 7-methyl-L-tryptophan
  MOD_RES 5: note = N6-acetyl-N6-methyl-L-lysine
  MOD_RES 6: note = L-penicillamine
  MOD_RES 7: note = 4-(2-aminoethoxy)-L-phenylalanine
  MOD_RES 8: note = 3-(2-naphthyl)-L-alanine
  MOD_RES 9: note = 4-aminotetrahydro-2H-pyran-4-carboxylic acid
  MOD_RES 10: note = N6-acetyl-L-lysine
  MOD_RES 12: note = 3-(3-Pyridyl)-L-alanine
  MOD_RES 13: note = MeGly
  SITE 13: note = C-terminal amidyl
  SITE 1: note = N-terminal acetyl
XNTWXXXXXKNXX

SEQ ID NO: 58 - protein, 13 aa, synthetic construct
  MOD_RES 1: note = L-penicillamine
  MOD_RES 2: note = N4-methyl-L-asparagine
  MOD_RES 4: note = 7-methyl-L-tryptophan
  MOD_RES 5: note = N6-acetyl-N6-methyl-L-lysine
  MOD_RES 6: note = L-penicillamine
  MOD_RES 7: note = 4-(2-aminoethoxy)-L-phenylalanine(Ac)
  MOD_RES 8: note = 3-(2-naphthyl)-L-alanine
  MOD_RES 9: note = 4-aminotetrahydro-2H-pyran-4-carboxylic acid
  MOD_RES 10: note = N6-acetyl-N6-methyl-L-lysine
  MOD_RES 12: note = 3-(3-Pyridyl)-L-alanine
  MOD_RES 13: note = MeGly
  SITE 1: note = N-terminal acetyl
  SITE 13: note = C-terminal amidyl
XNTWXXXXXXNXX

SEQ ID NO: 59 - protein, 13 aa, synthetic construct
  MOD_RES 1: note = L-penicillamine
  MOD_RES 4: note = 7-methyl-L-tryptophan
  MOD_RES 5: note = N6-acetyl-L-lysine
  MOD_RES 6: note = L-penicillamine
  MOD_RES 7: note = 4-(2-aminoethoxy)-L-phenylalanine
  MOD_RES 8: note = 3-(2-naphthyl)-L-alanine
  MOD_RES 9: note = 4-aminotetrahydro-2H-pyran-4-carboxylic acid
  MOD_RES 10: note = N6-acetyl-N6-methyl-L-lysine
  MOD_RES 12: note = 3-(3-Pyridyl)-L-alanine
  MOD_RES 13: note = MeGly
  SITE 13: note = C-terminal amidyl
  SITE 1: note = N-terminal acetyl
XNTWKXXXXXNXX

SEQ ID NO: 60 - protein, 13 aa, synthetic construct
  MOD_RES 1: note = L-penicillamine
  MOD_RES 4: note = 7-methyl-L-tryptophan
  MOD_RES 5: note = N5-(tert-butyl)-L-glutamine
  MOD_RES 6: note = L-penicillamine
  MOD_RES 7: note = 4-(2-aminoethoxy)-L-phenylalanine
  MOD_RES 8: note = 3-(2-naphthyl)-L-alanine
  MOD_RES 9: note = 4-aminotetrahydro-2H-pyran-4-carboxylic acid
  MOD_RES 10: note = N6-acetyl-L-lysine
  MOD_RES 12: note = 3-(3-Pyridyl)-L-alanine
  MOD_RES 13: note = MeGly
  SITE 1: note = N-terminal 2,2,2-Trifluoroethanoyl
  SITE 13: note = C-terminal amidyl
XNTWXXXXXKNXX

SEQ ID NO: 61 - protein, 13 aa, synthetic construct
  MOD_RES 1: note = L-penicillamine
  MOD_RES 4: note = 7-methyl-L-tryptophan
  MOD_RES 5: note = N5,N5-dimethyl-L-glutamine
  MOD_RES 6: note = L-penicillamine
  MOD_RES 7: note = 4-(2-aminoethoxy)-L-phenylalanine
  MOD_RES 8: note = 3-(2-naphthyl)-L-alanine
  MOD_RES 9: note = 4-aminotetrahydro-2H-pyran-4-carboxylic acid
  MOD_RES 10: note = N6-acetyl-L-lysine
  MOD_RES 12: note = 3-(3-Pyridyl)-L-alanine
  MOD_RES 13: note = MeGly
  SITE 1: note = N-terminal 2,2,2-TrifluoroethanoylO
  SITE 13: note = C-terminal amidyl
XNTWXXXXXKNXX

SEQ ID NO: 62 - protein, 13 aa, synthetic construct
  MOD_RES 1: note = L-penicillamine
  MOD_RES 4: note = 7-methyl-L-tryptophan
  MOD_RES 5: note = N5,N5-dimethyl-L-glutamine
  MOD_RES 6: note = L-penicillamine
  MOD_RES 7: note = 4-(2-aminoethoxy)-L-phenylalanine
  MOD_RES 8: note = 3-(2-naphthyl)-L-alanine
  MOD_RES 9: note = 4-aminotetrahydro-2H-pyran-4-carboxylic acid
  MOD_RES 10: note = N5,N5-dimethyl-L-glutamine
  MOD_RES 12: note = 3-(3-Pyridyl)-L-alanine
  MOD_RES 13: note = MeGly
  SITE 1: note = N-terminal 2,2,2-Trifluoroethanoyl
  SITE 13: note = C-terminal amidyl
XNTWXXXXXXNXX

SEQ ID NO: 63 - protein, 12 aa, synthetic construct
  MOD_RES 1: note = L-penicillamine
  MOD_RES 4: note = 7-methyl-L-tryptophan
  MOD_RES 5: note = N6-acetyl-L-lysine
  MOD_RES 6: note = L-penicillamine
  MOD_RES 7: note = 4-(2-aminoethoxy)-L-phenylalanine
  MOD_RES 8: note = 3-(2-naphthyl)-L-alanine
  MOD_RES 9: note = 4-aminotetrahydro-2H-pyran-4-carboxylic acid
  MOD_RES 10: note = N6-acetyl-L-lysine
  MOD_RES 12: note = 3-(3-Pyridyl)-L-alanine
  SITE 12: note = C-terminal N,N-dimethylamidyl
  SITE 1: note = N-terminal 2,2,2-Trifluoroethanoyl
XNTWKXXXXKNX

SEQ ID NO: 64 - protein, 13 aa, synthetic construct
  MOD_RES 1: note = L-penicillamine
  MOD_RES 4: note = 7-methyl-L-tryptophan
  MOD_RES 5: note = N6-acetyl-L-lysine
  MOD_RES 6: note = L-penicillamine
  MOD_RES 7: note = 4-(2-aminoethoxy)-L-phenylalanine
  MOD_RES 8: note = 3-(2-naphthyl)-L-alanine
  MOD_RES 9: note = 4-aminotetrahydro-2H-pyran-4-carboxylic acid
  MOD_RES 10: note = N6-acetyl-L-lysine
  MOD_RES 12: note = 3-(3-Pyridyl)-L-alanine
  MOD_RES 13: note = MeGly
  SITE 13: note = C-terminal amidyl
  SITE 1: note = N-terminal 2,5,8,11,14,17-hexaoxaicosan-20-oyl
XNTWKXXXXKNXX

SEQ ID NO: 65 - protein, 13 aa, synthetic construct
  MOD_RES 1: note = L-penicillamine
  MOD_RES 4: note = 7-methyl-L-tryptophan
  MOD_RES 5: note = N6-acetyl-L-lysine
  MOD_RES 6: note = L-penicillamine
  MOD_RES 7: note = 4-(2-aminoethoxy)-L-phenylalanine(NmPEG6)
  MOD_RES 8: note = 3-(2-naphthyl)-L-alanine
  MOD_RES 9: note = 4-aminotetrahydro-2H-pyran-4-carboxylic acid
  MOD_RES 10: note = N6-acetyl-L-lysine
  MOD_RES 12: note = 3-(3-Pyridyl)-L-alanine
  MOD_RES 13: note = MeGly
  SITE 13: note = C-terminal amidyl
  SITE 1: note = N-terminal acetyl
XNTWKXXXXKNXX

SEQ ID NO: 66 - protein, 13 aa, synthetic construct
  MOD_RES 1: note = L-penicillamine
  MOD_RES 2: note = N4,N4-dimethyl-L-asparagine
  MOD_RES 4: note = 7-methyl-L-tryptophan
  MOD_RES 5: note = N6-acetyl-N6-methyl-L-lysine
  MOD_RES 6: note = L-penicillamine
  MOD_RES 7: note (S)-2-amino-3-(4-(2-(dimethylamino)ethoxy)phenyl)propanoic acid
  MOD_RES 8: note = 3-(2-naphthyl)-L-alanine
  MOD_RES 9: note = 4-aminotetrahydro-2H-pyran-4-carboxylic acid
  MOD_RES 10: note = N6-acetyl-N6-methyl-L-lysine
  MOD_RES 12: note = 3-(3-Pyridyl)-L-alanine
  MOD_RES 13: note = MeGly
  SITE 1: note = N-terminal 2,2,2-Trifluoroethanoyl
  SITE 13: note = C-terminal N,N-dimethylamidyl
XNTWXXXXXXNXX

SEQ ID NO: 67 - protein, 13 aa, synthetic construct
  MOD_RES 1: note = L-penicillamine
  MOD_RES 2: note = N4-methyl-L-asparagine
  MOD_RES 4: note = 7-methyl-L-tryptophan
  MOD_RES 5: note = N6-acetyl-N6-methyl-L-lysine
  MOD_RES 6: note = L-penicillamine
  MOD_RES 7: note = 4-(2-aminoethoxy)-L-phenylalanine(NMe)
  MOD_RES 8: note = 3-(2-naphthyl)-L-alanine
  MOD_RES 9: note = 4-aminotetrahydro-2H-pyran-4-carboxylic acid
  MOD_RES 10: note = N6-acetyl-N6-methyl-L-lysine
  MOD_RES 12: note = 3-(3-Pyridyl)-L-alanine
  MOD_RES 13: note = MeGly
  SITE 1: note = N-terminal acetyl
  SITE 13: note = C-terminal methylamidyl
XNTWXXXXXXNXX

SEQ ID NO: 68 - protein, 13 aa, synthetic construct
  MOD_RES 1: note = L-penicillamine
  MOD_RES 2: note = N4,N4-dimethyl-L-asparagine
  MOD_RES 4: note = 7-methyl-L-tryptophan
  MOD_RES 5: note = N6-acetyl-N6-methyl-L-lysine
  MOD_RES 6: note = L-penicillamine
  MOD_RES 7: note = 4-(2-aminoethoxy)-L-phenylalanine
  MOD_RES 8: note = 3-(2-naphthyl)-L-alanine
  MOD_RES 9: note = 4-aminotetrahydro-2H-pyran-4-carboxylic acid
  MOD_RES 10: note = N6-acetyl-N6-methyl-L-lysine
  MOD_RES 12: note = 3-(3-Pyridyl)-L-alanine
  MOD_RES 13: note = MeGly
  SITE 13: note = C-terminal N,N-dimethylamidyl
  SITE 1: note = N-terminal 2,2,2-Trifluoroethanoyl
XNTWXXXXXXNXX

SEQ ID NO: 69 - protein, 13 aa, synthetic construct
  MOD_RES 1: note = L-penicillamine
  MOD_RES 4: note = 7-methyl-L-tryptophan
  MOD_RES 5: note = N6-acetyl-N6-methyl-L-lysine
  MOD_RES 6: note = L-penicillamine
  MOD_RES 7: note = 4-(2-aminoethoxy)-L-phenylalanine
  MOD_RES 8: note = 3-(2-naphthyl)-L-alanine
  MOD_RES 9: note = 4-aminotetrahydro-2H-pyran-4-carboxylic acid
  MOD_RES 10: note = N6-acetyl-N6-methyl-L-lysine
  MOD_RES 12: note = 3-(3-Pyridyl)-L-alanine
  MOD_RES 13: note = MeGly
  SITE 13: note = C-terminal amidyl
  SITE 1: note = N-terminal 2,2,2-Trifluoroethanoyl
XNTWXXXXXXNXX

SEQ ID NO: 70 - protein, 13 aa, synthetic construct
  MOD_RES 1: note = L-penicillamine
  MOD_RES 4: note = 7-methyl-L-tryptophan
  MOD_RES 5: note = (S)-2-amino-4-(N-methylacetamido)butanoic acid
  MOD_RES 6: note = L-penicillamine
  MOD_RES 7: note = 4-(2-aminoethoxy)-L-phenylalanine
  MOD_RES 8: note = 3-(2-naphthyl)-L-alanine
  MOD_RES 9: note = 4-aminotetrahydro-2H-pyran-4-carboxylic acid
  MOD_RES 10: note = N6-acetyl-L-lysine
  MOD_RES 12: note = 3-(3-Pyridyl)-L-alanine
  MOD_RES 13: note = MeGly
  SITE 1: note = N-terminal 2,2,2-Trifluoroethanoyl
  SITE 13: note = C-terminal amidyl
XNTWXXXXXKNXX

SEQ ID NO: 71 - protein, 13 aa, synthetic construct
  MOD_RES 1: note = L-penicillamine
  MOD_RES 4: note = 7-methyl-L-tryptophan
  MOD_RES 5: note = (S)-2-amino-4-(N-methylacetamido)butanoic acid
  MOD_RES 6: note = L-penicillamine
  MOD_RES 7: note (S)-2-amino-3-(4-(2-(dimethylamino)ethoxy)phenyl)propanoic acid
  MOD_RES 8: note = 3-(2-naphthyl)-L-alanine
  MOD_RES 9: note = 4-aminotetrahydro-2H-pyran-4-carboxylic acid
  MOD_RES 10: note = N5,N5-dimethyl-L-glutamine
  MOD_RES 12: note = 3-(3-Pyridyl)-L-alanine
  MOD_RES 13: note = MeGly
  SITE 13: note = C-terminal amidyl
  SITE 1: note = N-terminal 2,2,2-Trifluoroethanoyl
XNTWXXXXXXNXX

SEQ ID NO: 72 - protein, 13 aa, synthetic construct
  MOD_RES 1: note = L-penicillamine
  MOD_RES 4: note = 7-methyl-L-tryptophan
  MOD_RES 5: note = N6-acetyl-L-lysine
  MOD_RES 6: note = L-penicillamine
  MOD_RES 7: note = 4-(2-aminoethoxy)-L-phenylalanine
  MOD_RES 8: note = 3-(2-naphthyl)-L-alanine
  MOD_RES 9: note = 4-aminotetrahydro-2H-pyran-4-carboxylic acid
  MOD_RES 10: note = N5,N5-dimethyl-L-glutamine
  MOD_RES 12: note = 3-(3-Pyridyl)-L-alanine
  MOD_RES 13: note = MeGly
  SITE 13: note = C-terminal amidyl
  SITE 1: note = N-terminal 2,2,2-Trifluoroethanoyl
XNTWKXXXXXNXX

SEQ ID NO: 73 - protein, 13 aa, synthetic construct
  MOD_RES 1: note = L-penicillamine
  MOD_RES 4: note = 7-methyl-L-tryptophan
  MOD_RES 5: note = N6-acetyl-L-lysine
  MOD_RES 6: note = L-penicillamine
  MOD_RES 7: note = 4-(2-aminoethoxy)-L-phenylalanine
  MOD_RES 8: note = 3-(2-naphthyl)-L-alanine
  MOD_RES 9: note = 4-aminotetrahydro-2H-pyran-4-carboxylic acid
  MOD_RES 10: note = N6-acetyl-L-lysine
  MOD_RES 12: note = 3-(3-Pyridyl)-L-alanine
  MOD_RES 13: note = 4,4-difluoro-L-proline
  SITE 1: note = N-terminal 2,2,2-Trifluoroethanoyl
  SITE 13: note = C-terminal N,N-dimethylamidyl
XNTWKXXXXKNXX

SEQ ID NO: 74 - protein, 13 aa, synthetic construct
  MOD_RES 1: note = L-penicillamine
  MOD_RES 4: note = 7-methyl-L-tryptophan
  MOD_RES 5: note = N6-acetyl-L-lysine
  MOD_RES 6: note = L-penicillamine
  MOD_RES 7: note = 4-(2-aminoethoxy)-L-phenylalanine
  MOD_RES 8: note = 3-(2-naphthyl)-L-alanine
  MOD_RES 9: note = 4-aminotetrahydro-2H-pyran-4-carboxylic acid
  MOD_RES 10: note = N6-acetyl-L-lysine
  MOD_RES 12: note = 3-(3-Pyridyl)-L-alanine
  MOD_RES 13: note = MeGly
  SITE 13: note = C-terminal N,N-dimethylamidyl
  SITE 1: note = N-terminal 2,2,2-Trifluoroethanoyl
XNTWKXXXXKNXX

SEQ ID NO: 75 - protein, 13 aa, synthetic construct
  MOD_RES 1: note = L-penicillamine
  MOD_RES 4: note = 7-methyl-L-tryptophan
  MOD_RES 5: note = (S)-2-amino-4-(N-methylacetamido)butanoic acid
  MOD_RES 6: note = L-penicillamine
  MOD_RES 7: note = 4-(2-aminoethoxy)-L-phenylalanine
  MOD_RES 8: note = 3-(2-naphthyl)-L-alanine
  MOD_RES 9: note = 4-aminotetrahydro-2H-pyran-4-carboxylic acid
  MOD_RES 10: note = N5,N5-dimethyl-L-glutamine
  MOD_RES 12: note = 3-(3-Pyridyl)-L-alanine
  MOD_RES 13: note = MeGly
  SITE 1: note = N-terminal 2,2,2-Trifluoroethanoyl
  SITE 13: note = C-terminal amidyl
XNTWXXXXXXNXX

SEQ ID NO: 76 - protein, 13 aa, synthetic construct
  MOD_RES 1: note = L-penicillamine
  MOD_RES 4: note = 7-methyl-L-tryptophan
  MOD_RES 5: note = N6-acetyl-L-lysine
  MOD_RES 6: note = L-penicillamine
  MOD_RES 7: note = 4-(2-aminoethoxy)-L-phenylalanine
  MOD_RES 8: note = 3-(2-naphthyl)-L-alanine
  MOD_RES 9: note = 4-aminotetrahydro-2H-pyran-4-carboxylic acid
  MOD_RES 10: note = (S)-2-amino-4-(2-methyl-2H-tetrazol-5-yl)butanoic acid
  MOD_RES 12: note = 3-(3-Pyridyl)-L-alanine
  MOD_RES 13: note = MeGly
  SITE 13: note = C-terminal amidyl
  SITE 1: note = N-terminal 2,2,2-Trifluoroethanoyl
XNTWKXXXXXNXX

SEQ ID NO: 77 - protein, 13 aa, synthetic construct
  MOD_RES 1: note = L-penicillamine
  MOD_RES 4: note = 7-methyl-L-tryptophan
  MOD_RES 5: note = N6-acetyl-L-lysine
  MOD_RES 6: note = L-penicillamine
  MOD_RES 7: note = 4-(2-aminoethoxy)-L-phenylalanine
  MOD_RES 8: note = 3-(2-naphthyl)-L-alanine
  MOD_RES 9: note = 4-aminotetrahydro-2H-pyran-4-carboxylic acid
  MOD_RES 10: note = Tetrazole
  MOD_RES 12: note = 3-(3-Pyridyl)-L-alanine
  MOD_RES 13: note = MeGly
  SITE 1: note = N-terminal 2,2,2-Trifluoroethanoyl
  SITE 13: note = C-terminal amidyl
XNTWKXXXXXNXX

SEQ ID NO: 78 - protein, 13 aa, synthetic construct
  MOD_RES 1: note = L-penicillamine
  MOD_RES 4: note = 7-methyl-L-tryptophan
  MOD_RES 5: note (R)-21-acetyl-26-amino-20-oxo-2,5,8,11,14,17-hexaoxa-21-aza heptacosan-27-oic acid
  MOD_RES 6: note = L-penicillamine
  MOD_RES 7: note = 4-(2-aminoethoxy)-L-phenylalanine
  MOD_RES 8: note = 3-(2-naphthyl)-L-alanine
  MOD_RES 9: note = 4-aminotetrahydro-2H-pyran-4-carboxylic acid
  MOD_RES 10: note = N6-acetyl-L-lysine
  MOD_RES 12: note = 3-(3-Pyridyl)-L-alanine
  MOD_RES 13: note = MeGly
  SITE 13: note = C-terminal amidyl
  SITE 1: note = N-terminal acetyl
XNTWXXXXXKNXX

SEQ ID NO: 79 - protein, 13 aa, synthetic construct
  MOD_RES 1: note = L-penicillamine
  MOD_RES 2: note = N4,N4-dimethyl-L-asparagine
  MOD_RES 4: note = 7-methyl-L-tryptophan
  MOD_RES 5: note = N6-acetyl-N6-methyl-L-lysine
  MOD_RES 6: note = L-penicillamine
  MOD_RES 7: note (S)-2-amino-3-(4-(2-(dimethylamino)ethoxy)phenyl)propanoic acid
  MOD_RES 8: note = 3-(2-naphthyl)-L-alanine
  MOD_RES 9: note = 4-aminotetrahydro-2H-pyran-4-carboxylic acid
  MOD_RES 10: note = N5,N5-dimethyl-L-glutamine
  MOD_RES 12: note = 3-(3-Pyridyl)-L-alanine
  MOD_RES 13: note = MeGly
  SITE 1: note = N-terminal 2,2,2-Trifluoroethanoyl
  SITE 13: note = C-terminal amidyl
XNTWXXXXXXNXX

SEQ ID NO: 80 - protein, 14 aa, synthetic construct
  MOD_RES 1: note = (R)-5-amino-5-carboxy-N,N,N-trimethylpentan-1-aminium
  MOD_RES 2: note = L-penicillamine
  MOD_RES 5: note = 7-methyl-L-tryptophan
  MOD_RES 6: note = N6-acetyl-L-lysine
  MOD_RES 7: note = L-penicillamine
  MOD_RES 8: note = 4-(2-aminoethoxy)-L-phenylalanine
  MOD_RES 9: note = 3-(2-naphthyl)-L-alanine
  MOD_RES 10: note = 4-aminotetrahydro-2H-pyran-4-carboxylic acid
  MOD_RES 11: note = N6-acetyl-L-lysine
  MOD_RES 13: note = 3-(3-Pyridyl)-L-alanine
  MOD_RES 14: note = MeGly
  SITE 14: note = C-terminal amidyl
  SITE 1: note = N-terminal 2,2,2-Trifluoroethanoyl
KXNTWKXXXXKNXX

SEQ ID NO: 81 - protein, 13 aa, synthetic construct
  MOD_RES 1: note = L-penicillamine
  MOD_RES 4: note = 7-methyl-L-tryptophan
  MOD_RES 5: note = N6-acetyl-L-lysine
  MOD_RES 6: note = L-penicillamine
  MOD_RES 7: note = 4-(2-aminoethoxy)-L-phenylalanine
  MOD_RES 8: note = 3-(2-naphthyl)-L-alanine
  MOD_RES 9: note = 4-aminotetrahydro-2H-pyran-4-carboxylic acid
  MOD_RES 12: note = 3-(3-Pyridyl)-L-alanine
  MOD_RES 13: note = MeGly
  SITE 1: note = N-terminal (6-(trimethylammonio)hexanoyl)amidyl
  SITE 13: note = C-terminal amidyl
XNTWKXXXXENXX

SEQ ID NO: 82 - protein, 13 aa, synthetic construct
  MOD_RES 1: note = L-penicillamine
  MOD_RES 4: note = 7-methyl-L-tryptophan
  MOD_RES 5: note = N6-acetyl-L-lysine
  MOD_RES 6: note = L-penicillamine
  MOD_RES 7: note = 4-(2-aminoethoxy)-L-phenylalanine
  MOD_RES 8: note = 3-(2-naphthyl)-L-alanine
  MOD_RES 9: note = 4-aminotetrahydro-2H-pyran-4-carboxylic acid
  MOD_RES 12: note = 3-(3-Pyridyl)-L-alanine
  MOD_RES 13: note = MeGly
  SITE 13: note = C-terminal amidyl
  SITE 1: note = N-terminal N,N,N-trimethyl-2-(2-(3-carbonylpropoxy)ethoxy)ethan-1-amin ium
XNTWKXXXXENXX

SEQ ID NO: 83 - protein, 14 aa, synthetic construct
  MOD_RES 1: note (R)-6-((5-amino-5-carboxypentyl)amino)-N,N,N-trimethyl-6-ox ohexan-1-aminium
  MOD_RES 2: note = L-penicillamine
  MOD_RES 5: note = 7-methyl-L-tryptophan
  MOD_RES 6: note = N6-acetyl-L-lysine
  MOD_RES 7: note = L-penicillamine
  MOD_RES 8: note = 4-(2-aminoethoxy)-L-phenylalanine
  MOD_RES 9: note = 3-(2-naphthyl)-L-alanine
  MOD_RES 10: note = 4-aminotetrahydro-2H-pyran-4-carboxylic acid
  MOD_RES 13: note = 3-(3-Pyridyl)-L-alanine
  MOD_RES 14: note = MeGly
  SITE 14: note = C-terminal amidyl
  SITE 1: note = N-terminal acetyl
XXNTWKXXXXENXX

SEQ ID NO: 84 - protein, 14 aa, synthetic construct
  MOD_RES 1: note (S)-2-(2-(3-((5-amino-5-carboxypentyl)amino)-3-oxopropoxy)e thoxy)-N,N,N-trimethylethan-1-aminium
  MOD_RES 2: note = L-penicillamine
  MOD_RES 5: note = 7-methyl-L-tryptophan
  MOD_RES 6: note = N6-acetyl-L-lysine
  MOD_RES 7: note = L-penicillamine
  MOD_RES 8: note = 4-(2-aminoethoxy)-L-phenylalanine
  MOD_RES 9: note = 3-(2-naphthyl)-L-alanine
  MOD_RES 10: note = 4-aminotetrahydro-2H-pyran-4-carboxylic acid
  MOD_RES 13: note = 3-(3-Pyridyl)-L-alanine
  MOD_RES 14: note = MeGly
  SITE 14: note = C-terminal amidyl
  SITE 1: note = N-terminal acetyl
XXNTWKXXXXENXX

SEQ ID NO: 85 - protein, 13 aa, synthetic construct
  MOD_RES 1: note = L-penicillamine
  MOD_RES 4: note = 7-methyl-L-tryptophan
  MOD_RES 5: note = N6-acetyl-L-lysine
  MOD_RES 6: note = L-penicillamine
  MOD_RES 7: note = 4-(2-aminoethoxy)-L-phenylalanine
  MOD_RES 8: note = 3-(2-naphthyl)-L-alanine
  MOD_RES 9: note = 4-aminotetrahydro-2H-pyran-4-carboxylic acid
  MOD_RES 10: note (R)-6-((5-amino-5-carboxypentyl)amino)-N,N,N-trimethyl-6-ox ohexan-1-aminium
  MOD_RES 12: note = 3-(3-Pyridyl)-L-alanine
  MOD_RES 13: note = MeGly
  SITE 13: note = C-terminal amidyl
  SITE 1: note = N-terminal acetyl
XNTWKXXXXXNXX

SEQ ID NO: 86 - protein, 13 aa, synthetic construct
  MOD_RES 1: note = L-penicillamine
  MOD_RES 4: note = 7-methyl-L-tryptophan
  MOD_RES 5: note = N6-acetyl-L-lysine
  MOD_RES 6: note = L-penicillamine
  MOD_RES 7: note = 4-(2-aminoethoxy)-L-phenylalanine
  MOD_RES 8: note = 3-(2-naphthyl)-L-alanine
  MOD_RES 9: note = 4-aminotetrahydro-2H-pyran-4-carboxylic acid
  MOD_RES 10: note (S)-2-(2-(3-((5-amino-5-carboxypentyl)amino)-3-oxopropoxy)e thoxy)-N,N,N-trimethylethan-1-aminium
  MOD_RES 12: note = 3-(3-Pyridyl)-L-alanine
  MOD_RES 13: note = MeGly
  SITE 13: note = C-terminal amidyl
  SITE 1: note = N-terminal acetyl
XNTWKXXXXXNXX

SEQ ID NO: 87 - protein, 14 aa, synthetic construct
  MOD_RES 1: note (R)-6-((5-amino-5-carboxypentyl)amino)-N,N,N-trimethyl-6-ox ohexan-1-aminium
  MOD_RES 2: note = L-penicillamine
  MOD_RES 5: note = 7-methyl-L-tryptophan
  MOD_RES 6: note = N6-acetyl-L-lysine
  MOD_RES 7: note = L-penicillamine
  MOD_RES 8: note = 4-(2-aminoethoxy)-L-phenylalanine
  MOD_RES 9: note = 3-(2-naphthyl)-L-alanine
  MOD_RES 10: note = 4-aminotetrahydro-2H-pyran-4-carboxylic acid
  MOD_RES 11: note = N6-acetyl-L-lysine
  MOD_RES 13: note = 3-(3-Pyridyl)-L-alanine
  MOD_RES 14: note = MeGly
  SITE 14: note = C-terminal amidyl
  SITE 1: note = N-terminal acetyl
XXNTWKXXXXKNXX

SEQ ID NO: 88 - protein, 14 aa, synthetic construct
  MOD_RES 1: note (S)-2-(2-(3-((5-amino-5-carboxypentyl)amino)-3-oxopropoxy)e thoxy)-N,N,N-trimethylethan-1-aminium
  MOD_RES 2: note = L-penicillamine
  MOD_RES 5: note = 7-methyl-L-tryptophan
  MOD_RES 6: note = N6-acetyl-L-lysine
  MOD_RES 7: note = L-penicillamine
  MOD_RES 8: note = 4-(2-aminoethoxy)-L-phenylalanine
  MOD_RES 9: note = 3-(2-naphthyl)-L-alanine
  MOD_RES 10: note = 4-aminotetrahydro-2H-pyran-4-carboxylic acid
  MOD_RES 11: note = N6-acetyl-L-lysine
  MOD_RES 13: note = 3-(3-Pyridyl)-L-alanine
  MOD_RES 14: note = MeGly
  SITE 1: note = N-terminal acetyl
  SITE 14: note = C-terminal amidyl
XXNTWKXXXXKNXX

SEQ ID NO: 89 - protein, 13 aa, synthetic construct
  MOD_RES 1: note = L-penicillamine
  MOD_RES 4: note = 7-methyl-L-tryptophan
  MOD_RES 5: note = N6-acetyl-L-lysine
  MOD_RES 6: note = L-penicillamine
  MOD_RES 7: note = 4-(2-aminoethoxy)-L-phenylalanine
  MOD_RES 8: note = 3-(2-naphthyl)-L-alanine
  MOD_RES 9: note = 4-aminotetrahydro-2H-pyran-4-carboxylic acid
  MOD_RES 10: note = N6-acetyl-L-lysine
  MOD_RES 12: note = 3-(3-Pyridyl)-L-alanine
  MOD_RES 13: note = MeGly
  SITE 13: note = C-terminal amidyl
  SITE 1: note = N-terminal (6-(trimethylammonio)hexanoyl)amidyl
XNTWKXXXXKNXX

SEQ ID NO: 90 - protein, 13 aa, synthetic construct
  MOD_RES 1: note = L-penicillamine
  MOD_RES 4: note = 7-methyl-L-tryptophan
  MOD_RES 5: note = N6-acetyl-L-lysine
  MOD_RES 6: note = L-penicillamine
  MOD_RES 7: note = 4-(2-aminoethoxy)-L-phenylalanine
  MOD_RES 8: note = 3-(2-naphthyl)-L-alanine
  MOD_RES 9: note = 4-aminotetrahydro-2H-pyran-4-carboxylic acid
  MOD_RES 10: note = N6-acetyl-L-lysine
  MOD_RES 12: note = 3-(3-Pyridyl)-L-alanine
  MOD_RES 13: note = MeGly
  SITE 1: note = N-terminal N,N,N-trimethyl-2-(2-(3-carbonylpropoxy)ethoxy)ethan-1-amin ium
  SITE 13: note = C-terminal amidyl
XNTWKXXXXKNXX

SEQ ID NO: 91 - protein, 13 aa, synthetic construct
  MOD_RES 1: note = L-penicillamine
  MOD_RES 2: note = N4,N4-dimethyl-L-asparagine
  MOD_RES 4: note = 7-methyl-L-tryptophan
  MOD_RES 5: note = N5,N5-dimethyl-L-glutamine
  MOD_RES 6: note = L-penicillamine
  MOD_RES 7: note (S)-2-amino-3-(4-(2-(dimethylamino)ethoxy)phenyl)propanoic acid
  MOD_RES 8: note = 3-(2-naphthyl)-L-alanine
  MOD_RES 9: note = 4-aminotetrahydro-2H-pyran-4-carboxylic acid
  MOD_RES 10: note = N5,N5-dimethyl-L-glutamine
  MOD_RES 12: note = 3-(3-Pyridyl)-L-alanine
  MOD_RES 13: note = MeGly
  SITE 13: note = C-terminal N,N-dimethylamidyl
  SITE 1: note = N-terminal (6-(trimethylammonio)hexanoyl)amidyl
XNTWXXXXXXNXX

SEQ ID NO: 92 - protein, 13 aa, synthetic construct
  MOD_RES 1: note = L-penicillamine
  MOD_RES 4: note = 7-methyl-L-tryptophan
  MOD_RES 5: note = N6-acetyl-L-lysine
  MOD_RES 6: note = L-penicillamine
  MOD_RES 7: note = 4-(2-aminoethoxy)-L-phenylalanine
  MOD_RES 8: note = 3-(2-naphthyl)-L-alanine
  MOD_RES 9: note = 4-aminotetrahydro-2H-pyran-4-carboxylic acid
  MOD_RES 10: note (R)-26-amino-21-methyl-20-oxo-2,5,8,11,14,17-hexaoxa-21-aza heptacosan-27-oic acid
  MOD_RES 12: note = 3-(3-Pyridyl)-L-alanine
  MOD_RES 13: note = MeGly
  SITE 13: note = C-terminal amidyl
  SITE 1: note = N-terminal acetyl
XNTWKXXXXXNXX

SEQ ID NO: 93 - protein, 14 aa, synthetic construct
  MOD_RES 1: note = (R)-5-amino-5-carboxy-N,N,N-trimethylpentan-1-aminium
  MOD_RES 2: note = L-penicillamine
  MOD_RES 3: note = N4,N4-dimethyl-L-asparagine
  MOD_RES 5: note = 7-methyl-L-tryptophan
  MOD_RES 6: note = N6-acetyl-N6-methyl-L-lysine
  MOD_RES 7: note = L-penicillamine
  MOD_RES 8: note (S)-2-amino-3-(4-(2-(dimethylamino)ethoxy)phenyl)propanoic acid
  MOD_RES 9: note = 3-(2-naphthyl)-L-alanine
  MOD_RES 10: note = 4-aminotetrahydro-2H-pyran-4-carboxylic acid
  MOD_RES 13: note = 3-(3-Pyridyl)-L-alanine
  MOD_RES 14: note = MeGly
  SITE 1: note = N-terminal 2,2,2-Trifluoroethanoyl
  SITE 14: note = C-terminal N,N-dimethylamidyl
KXNTWXXXXXENXX

SEQ ID NO: 94 - protein, 13 aa, synthetic construct
  MOD_RES 1: note = L-penicillamine
  MOD_RES 2: note = N4,N4-dimethyl-L-asparagine
  MOD_RES 4: note (S)-2-amino-3-(7-(trifluoromethyl)-1H-indol-3-yl)propanoic acid
  MOD_RES 5: note = N6-acetyl-N6-methyl-L-lysine
  MOD_RES 6: note = L-penicillamine
  MOD_RES 7: note = 4-(2-aminoethoxy)-L-phenylalanine
  MOD_RES 8: note = 3-(2-naphthyl)-L-alanine
  MOD_RES 9: note = 4-aminotetrahydro-2H-pyran-4-carboxylic acid
  MOD_RES 10: note = N6-acetyl-N6-methyl-L-lysine
  MOD_RES 12: note = 3-(3-Pyridyl)-L-alanine
  MOD_RES 13: note = MeGly
  SITE 1: note = N-terminal 2,2,2-Trifluoroethanoyl
  SITE 13: note = C-terminal N,N-dimethylamidyl
XNTXKXXXXXNXX

SEQ ID NO: 95 - protein, 13 aa, synthetic construct
  MOD_RES 1: note = L-penicillamine
  MOD_RES 2: note = N4,N4-dimethyl-L-asparagine
  MOD_RES 4: note (S)-2-amino-3-(7-(trifluoromethyl)-1H-indol-3-yl)propanoic acid
  MOD_RES 5: note = N6-acetyl-N6-methyl-L-lysine
  MOD_RES 6: note = L-penicillamine
  MOD_RES 7: note (S)-2-amino-3-(4-(2-(dimethylamino)ethoxy)phenyl)propanoic acid
  MOD_RES 8: note = 3-(2-naphthyl)-L-alanine
  MOD_RES 9: note = 4-aminotetrahydro-2H-pyran-4-carboxylic acid
  MOD_RES 10: note = N6-acetyl-N6-methyl-L-lysine
  MOD_RES 12: note = 3-(3-Pyridyl)-L-alanine
  MOD_RES 13: note = MeGly
  SITE 1: note = N-terminal 2,2,2-Trifluoroethanoyl
  SITE 13: note = C-terminal N,N-dimethylamidyl
XNTXKXXXXKNXX

SEQ ID NO: 96 - protein, 14 aa, synthetic construct
  MOD_RES 1: note (R)-6-((5-amino-5-carboxypentyl)amino)-N,N,N-trimethyl-6-ox ohexan-1-aminium
  MOD_RES 2: note = L-penicillamine
  MOD_RES 3: note = N4,N4-dimethyl-L-asparagine
  MOD_RES 5: note = 7-methyl-L-tryptophan
  MOD_RES 6: note = N5,N5-dimethyl-L-glutamine
  MOD_RES 7: note = L-penicillamine
  MOD_RES 8: note (S)-2-amino-3-(4-(2-(dimethylamino)ethoxy)phenyl)propanoic acid
  MOD_RES 9: note = 3-(2-naphthyl)-L-alanine
  MOD_RES 10: note = 4-aminotetrahydro-2H-pyran-4-carboxylic acid
  MOD_RES 11: note = N5,N5-dimethyl-L-glutamine
  MOD_RES 13: note = 3-(3-Pyridyl)-L-alanine
  MOD_RES 14: note = MeGly
  SITE 1: note = N-terminal 2,2,2-Trifluoroethanoyl
  SITE 14: note = C-terminal N,N-dimethylamidyl
XXNTWXXXXXXNXX

SEQ ID NO: 97 - protein, 13 aa, synthetic construct
  MOD_RES 1: note = L-penicillamine
  MOD_RES 2: note = N4,N4-dimethyl-L-asparagine
  MOD_RES 4: note = 7-methyl-L-tryptophan
  MOD_RES 5: note = N5,N5-dimethyl-L-glutamine
  MOD_RES 6: note = L-penicillamine
  MOD_RES 7: note (S)-2-amino-3-(4-(2-(dimethylamino)ethoxy)phenyl)propanoic acid
  MOD_RES 8: note = 3-(2-naphthyl)-L-alanine
  MOD_RES 9: note = 4-aminotetrahydro-2H-pyran-4-carboxylic acid
  MOD_RES 12: note = 3-(3-Pyridyl)-L-alanine
  MOD_RES 13: note = MeGly
  SITE 1: note = N-terminal (6-(trimethylammonio)hexanoyl)amidyl
  SITE 13: note = C-terminal N,N-dimethylamidyl
XNTWXXXXXENXX

SEQ ID NO: 98 - protein, 13 aa, synthetic construct
  MOD_RES 1: note = L-penicillamine
  MOD_RES 2: note = N4,N4-dimethyl-L-asparagine
  MOD_RES 4: note = 7-methyl-L-tryptophan
  MOD_RES 5: note = N6-acetyl-N6-methyl-L-lysine
  MOD_RES 6: note = L-penicillamine
  MOD_RES 7: note (S)-2-amino-3-(4-(2-(dimethylamino)ethoxy)phenyl)propanoic acid
  MOD_RES 8: note = 3-(2-naphthyl)-L-alanine
  MOD_RES 9: note = 4-aminotetrahydro-2H-pyran-4-carboxylic acid
  MOD_RES 10: note = 3-(Acetylamino)-L-alanine
  MOD_RES 12: note = 3-(3-Pyridyl)-L-alanine
  MOD_RES 13: note = MeGly
  SITE 13: note = C-terminal N,N-dimethylamidyl
  SITE 1: note = N-terminal acetyl
XNTWXXXXXXNXX

SEQ ID NO: 99 - protein, 13 aa, synthetic construct
  MOD_RES 1: note = L-penicillamine
  MOD_RES 4: note = 7-methyl-L-tryptophan
  MOD_RES 5: note = N6-acetyl-L-lysine
  MOD_RES 6: note = L-penicillamine
  MOD_RES 7: note = 4-(2-aminoethoxy)-L-phenylalanine
  MOD_RES 8: note = 3-(2-naphthyl)-L-alanine
  MOD_RES 9: note = 4-aminotetrahydro-2H-pyran-4-carboxylic acid
  MOD_RES 10: note = 3-(Acetylamino)-L-alanine
  MOD_RES 12: note = 3-(3-Pyridyl)-L-alanine
  MOD_RES 13: note = MeGly
  SITE 1: note = N-terminal (6-(trimethylammonio)hexanoyl)amidyl
  SITE 13: note = C-terminal amidyl
XNTWKXXXXXNXX

SEQ ID NO: 100 - protein, 13 aa, synthetic construct
  MOD_RES 1: note = L-penicillamine
  MOD_RES 2: note = N4,N4-dimethyl-L-asparagine
  MOD_RES 4: note = 7-methyl-L-tryptophan
  MOD_RES 5: note = N5,N5-dimethyl-L-glutamine
  MOD_RES 6: note = L-penicillamine
  MOD_RES 7: note (S)-2-amino-3-(4-(2-(dimethylamino)ethoxy)phenyl)propanoic acid
  MOD_RES 8: note = 3-(2-naphthyl)-L-alanine
  MOD_RES 9: note = 4-amino-4-carboxy-1,1-dimethylpiperidin-1-ium
  MOD_RES 10: note = N5,N5-dimethyl-L-glutamine
  MOD_RES 12: note = 3-(3-Pyridyl)-L-alanine
  MOD_RES 13: note = MeGly
  SITE 1: note = N-terminal (6-(trimethylammonio)hexanoyl)amidyl
  SITE 13: note = C-terminal N,N-dimethylamidyl
XNTWXXXXXXNXX

SEQ ID NO: 101 - protein, 13 aa, synthetic construct
  MOD_RES 1: note = L-penicillamine
  MOD_RES 2: note = N4,N4-dimethyl-L-asparagine
  MOD_RES 4: note = 7-methyl-L-tryptophan
  MOD_RES 5: note = N5,N5-dimethyl-L-glutamine
  MOD_RES 6: note = L-penicillamine
  MOD_RES 7: note (S)-5-(4-(2-amino-2-carboxyethyl)phenoxy)-N,N,N-trimethylpe ntan-1-aminium
  MOD_RES 8: note = 3-(2-naphthyl)-L-alanine
  MOD_RES 9: note = 4-aminotetrahydro-2H-pyran-4-carboxylic acid
  MOD_RES 10: note = N5,N5-dimethyl-L-glutamine
  MOD_RES 12: note = 3-(3-Pyridyl)-L-alanine
  MOD_RES 13: note = MeGly
  SITE 13: note = C-terminal N,N-dimethylamidyl
  SITE 1: note = N-terminal (6-(trimethylammonio)hexanoyl)amidyl
XNTWXXXXXXNXX

SEQ ID NO: 102 - protein, 13 aa, synthetic construct
  MOD_RES 1: note = L-penicillamine
  MOD_RES 4: note = 7-methyl-L-tryptophan
  MOD_RES 5: note = N6-acetyl-L-lysine
  MOD_RES 6: note = L-penicillamine
  MOD_RES 7: note (S)-2-amino-3-(4-(2-(dimethylamino)ethoxy)phenyl)propanoic acid
  MOD_RES 8: note = 3-(2-naphthyl)-L-alanine
  MOD_RES 9: note = 4-aminotetrahydro-2H-pyran-4-carboxylic acid
  MOD_RES 10: note = 3-(Acetylamino)-L-alanine
  MOD_RES 12: note = 3-(3-Pyridyl)-L-alanine
  MOD_RES 13: note = MeGly
  SITE 1: note = N-terminal acetyl
  SITE 13: note = C-terminal amidyl
XNTWKXXXXXNXX

SEQ ID NO: 103 - protein, 13 aa, synthetic construct
  MOD_RES 1: note = L-penicillamine
  MOD_RES 4: note = 7-methyl-L-tryptophan
  MOD_RES 5: note = N6-acetyl-L-lysine
  MOD_RES 6: note = L-penicillamine
  MOD_RES 7: note (S)-2-amino-3-(4-(2-(dimethylamino)ethoxy)phenyl)propanoic acid
  MOD_RES 8: note = 3-(2-naphthyl)-L-alanine
  MOD_RES 9: note = 4-aminotetrahydro-2H-pyran-4-carboxylic acid
  MOD_RES 10: note = 3-(Acetylamino)-L-alanine
  MOD_RES 12: note = 3-(3-Pyridyl)-L-alanine
  MOD_RES 13: note = MeGly
  SITE 13: note = C-terminal amidyl
  SITE 1: note = N-terminal (6-(trimethylammonio)hexanoyl)amidyl
XNTWKXXXXXNXX

SEQ ID NO: 104 - protein, 13 aa, synthetic construct
  MOD_RES 1: note = L-penicillamine
  MOD_RES 2: note = N4,N4-dimethyl-L-asparagine
  MOD_RES 4: note = 7-methyl-L-tryptophan
  MOD_RES 5: note = N6-acetyl-N6-methyl-L-lysine
  MOD_RES 6: note = L-penicillamine
  MOD_RES 7: note (S)-2-amino-3-(4-(2-(dimethylamino)ethoxy)phenyl)propanoic acid
  MOD_RES 8: note = 3-(2-naphthyl)-L-alanine
  MOD_RES 9: note = 4-aminotetrahydro-2H-pyran-4-carboxylic acid
  MOD_RES 12: note = 3-(3-Pyridyl)-L-alanine
  MOD_RES 13: note = MeGly
  SITE 13: note = C-terminal N,N-dimethylamidyl
  SITE 1: note = N-terminal 2,2,2-Trifluoroethanoyl
XNTWXXXXXENXX

SEQ ID NO: 105 - protein, 14 aa, synthetic construct
  MOD_RES 1: note = (R)-5-amino-5-carboxy-N,N,N-trimethylpentan-1-aminium
  MOD_RES 2: note = L-penicillamine
  MOD_RES 3: note = N4,N4-dimethyl-L-asparagine
  MOD_RES 5: note = 7-methyl-L-tryptophan
  MOD_RES 6: note = N6-acetyl-N6-methyl-L-lysine
  MOD_RES 7: note = L-penicillamine
  MOD_RES 8: note (S)-2-amino-3-(4-(2-(dimethylamino)ethoxy)phenyl)propanoic acid
  MOD_RES 9: note = 3-(2-naphthyl)-L-alanine
  MOD_RES 10: note = 4-aminotetrahydro-2H-pyran-4-carboxylic acid
  MOD_RES 13: note = 3-(3-Pyridyl)-L-alanine
  MOD_RES 14: note = MeGly
  SITE 1: note = N-terminal acetyl
  SITE 14: note = C-terminal N,N-dimethylamidyl
KXNTWXXXXXENXX

SEQ ID NO: 106 - protein, 13 aa, synthetic construct
  MOD_RES 1: note = L-penicillamine
  MOD_RES 2: note = N4,N4-dimethyl-L-asparagine
  MOD_RES 4: note = 7-methyl-L-tryptophan
  MOD_RES 5: note = N6-acetyl-N6-methyl-L-lysine
  MOD_RES 6: note = L-penicillamine
  MOD_RES 7: note (S)-2-amino-3-(4-(2-(dimethylamino)ethoxy)phenyl)propanoic acid
  MOD_RES 8: note = 3-(2-naphthyl)-L-alanine
  MOD_RES 9: note = 4-aminotetrahydro-2H-pyran-4-carboxylic acid
  MOD_RES 12: note = 3-(3-Pyridyl)-L-alanine
  MOD_RES 13: note = MeGly
  SITE 13: note = C-terminal N,N-dimethylamidyl
  SITE 1: note = N-terminal acetyl
XNTWXXXXXENXX

SEQ ID NO: 107 - protein, 14 aa, synthetic construct
  MOD_RES 1: note (S)-2-(4-(((R)-5-amino-5-carboxypentyl)amino)-4-oxobutanami do)-3-carboxy-N,N,N-trimethylpropan-1-aminium
  MOD_RES 2: note = L-penicillamine
  MOD_RES 5: note = 7-methyl-L-tryptophan
  MOD_RES 6: note = N6-acetyl-L-lysine
  MOD_RES 7: note = L-penicillamine
  MOD_RES 8: note = 4-(2-aminoethoxy)-L-phenylalanine
  MOD_RES 9: note = 3-(2-naphthyl)-L-alanine
  MOD_RES 10: note = 4-aminotetrahydro-2H-pyran-4-carboxylic acid
  MOD_RES 11: note = N6-acetyl-L-lysine
  MOD_RES 13: note = 3-(3-Pyridyl)-L-alanine
  MOD_RES 14: note = MeGly
  SITE 14: note = C-terminal amidyl
  SITE 1: note = N-terminal acetyl
KXNTWKXXXXKNXX

SEQ ID NO: 108 - protein, 14 aa, synthetic construct
  MOD_RES 1: note (S)-2-(4-(((R)-5-amino-5-carboxypentyl)amino)-4-oxobutanami do)-3-carboxy-N,N,N-trimethylpropan-1-aminium
  MOD_RES 2: note = L-penicillamine
  MOD_RES 5: note = 7-methyl-L-tryptophan
  MOD_RES 6: note = N6-acetyl-L-lysine
  MOD_RES 7: note = L-penicillamine
  MOD_RES 8: note = 4-(2-aminoethoxy)-L-phenylalanine
  MOD_RES 9: note = 3-(2-naphthyl)-L-alanine
  MOD_RES 10: note = 4-aminotetrahydro-2H-pyran-4-carboxylic acid
  MOD_RES 11: note = N6-acetyl-L-lysine
  MOD_RES 13: note = 3-(3-Pyridyl)-L-alanine
  MOD_RES 14: note = MeGly
  SITE 14: note = C-terminal amidyl
  SITE 1: note = N-terminal acetyl
KXNTWKXXXXKNXX

SEQ ID NO: 109 - protein, 13 aa, synthetic construct
  MOD_RES 1: note = L-penicillamine
  MOD_RES 4: note = 7-methyl-L-tryptophan
  MOD_RES 5: note = N6-acetyl-L-lysine
  MOD_RES 6: note = L-penicillamine
  MOD_RES 7: note = 4-(2-aminoethoxy)-L-phenylalanine
  MOD_RES 8: note = 3-(2-naphthyl)-L-alanine
  MOD_RES 9: note = 4-aminotetrahydro-2H-pyran-4-carboxylic acid
  MOD_RES 10: note (S)-2-(4-(((R)-5-amino-5-carboxypentyl)amino)-4-oxobutanami do)-3-carboxy-N,N,N-trimethylpropan-1-aminium
  MOD_RES 12: note = 3-(3-Pyridyl)-L-alanine
  MOD_RES 13: note = MeGly
  SITE 1: note = N-terminal acetyl
  SITE 13: note = C-terminal amidyl
XNTWKXXXXKNXX

SEQ ID NO: 110 - protein, 13 aa, synthetic construct
  MOD_RES 1: note = L-penicillamine
  MOD_RES 4: note = 7-methyl-L-tryptophan
  MOD_RES 5: note = N6-acetyl-L-lysine
  MOD_RES 6: note = L-penicillamine
  MOD_RES 7: note = 4-(2-aminoethoxy)-L-phenylalanine
  MOD_RES 8: note = 3-(2-naphthyl)-L-alanine
  MOD_RES 9: note = 4-aminotetrahydro-2H-pyran-4-carboxylic acid
  MOD_RES 10: note (S)-2-(4-(((R)-5-amino-5-carboxypentyl)amino)-4-oxobutanami do)-3-carboxy-N,N,N-trimethylpropan-1-aminium
  MOD_RES 12: note = 3-(3-Pyridyl)-L-alanine
  MOD_RES 13: note = MeGly
  SITE 13: note = C-terminal amidyl
  SITE 1: note = N-terminal acetyl
XNTWKXXXXKNXX

SEQ ID NO: 111 - protein, 13 aa, synthetic construct
  MOD_RES 1: note = L-penicillamine
  MOD_RES 4: note = 7-methyl-L-tryptophan
  MOD_RES 5: note = N6-acetyl-L-lysine
  MOD_RES 6: note = L-penicillamine
  MOD_RES 7: note = 4-(2-aminoethoxy)-L-phenylalanine
  MOD_RES 8: note = 3-(2-naphthyl)-L-alanine
  MOD_RES 9: note = 4-aminotetrahydro-2H-pyran-4-carboxylic acid
  MOD_RES 10: note (R)-21-amino-21-carboxy-N,N,N,16-tetramethyl-15-oxo-3,6,9,1 2-tetraoxa-16-azahenicosan-1-aminium
  MOD_RES 12: note = 3-(3-Pyridyl)-L-alanine
  MOD_RES 13: note = MeGly
  SITE 13: note = C-terminal amidyl
  SITE 1: note = N-terminal acetyl
XNTWKXXXXXNXX

SEQ ID NO: 112 - protein, 13 aa, synthetic construct
  MOD_RES 1: note = L-penicillamine
  MOD_RES 4: note = 7-methyl-L-tryptophan
  MOD_RES 5: note = N6-acetyl-L-lysine
  MOD_RES 6: note = L-penicillamine
  MOD_RES 7: note = 4-(2-aminoethoxy)-L-phenylalanine
  MOD_RES 8: note = 3-(2-naphthyl)-L-alanine
  MOD_RES 9: note = 4-aminotetrahydro-2H-pyran-4-carboxylic acid
  MOD_RES 12: note = 3-(3-Pyridyl)-L-alanine
  MOD_RES 13: note = MeGly
  SITE 1: note = N-terminal acetyl
  SITE 13: note = C-terminal morpholino
XNTWKXXXXENXX

SEQ ID NO: 113 - protein, 13 aa, synthetic construct
  MOD_RES 1: note = L-penicillamine
  MOD_RES 4: note = 7-methyl-L-tryptophan
  MOD_RES 5: note = N6-acetyl-L-lysine
  MOD_RES 6: note = L-penicillamine
  MOD_RES 7: note = 4-(2-aminoethoxy)-L-phenylalanine
  MOD_RES 8: note = 3-(2-naphthyl)-L-alanine
  MOD_RES 9: note = 4-aminotetrahydro-2H-pyran-4-carboxylic acid
  MOD_RES 12: note = 3-(3-Pyridyl)-L-alanine
  MOD_RES 13: note = MeGly
  SITE 13: note = C-terminal 2-(2-methoxyethoxy)-N-methylethan-1-amino
  SITE 1: note = N-terminal acetyl
XNTWKXXXXENXX

SEQ ID NO: 114 - protein, 13 aa, synthetic construct
  MOD_RES 1: note = L-penicillamine
  MOD_RES 4: note = 7-methyl-L-tryptophan
  MOD_RES 5: note = N6-acetyl-L-lysine
  MOD_RES 6: note = L-penicillamine
  MOD_RES 7: note = 4-(2-aminoethoxy)-L-phenylalanine
  MOD_RES 8: note = 3-(2-naphthyl)-L-alanine
  MOD_RES 9: note = 4-aminotetrahydro-2H-pyran-4-carboxylic acid
  MOD_RES 12: note = 3-(3-Pyridyl)-L-alanine
  MOD_RES 13: note = MeGly
  SITE 13: note = C-terminal 1-methylpiperazino
  SITE 1: note = N-terminal acetyl
XNTWKXXXXENXX

SEQ ID NO: 115 - protein, 13 aa, synthetic construct
  MOD_RES 1: note = L-penicillamine
  MOD_RES 4: note = 7-methyl-L-tryptophan
  MOD_RES 5: note = N6-acetyl-L-lysine
  MOD_RES 6: note = L-penicillamine
  MOD_RES 7: note = 4-(2-aminoethoxy)-L-phenylalanine
  MOD_RES 8: note = 3-(2-naphthyl)-L-alanine
  MOD_RES 9: note = 4-aminotetrahydro-2H-pyran-4-carboxylic acid
  MOD_RES 12: note = 3-(3-Pyridyl)-L-alanine
  MOD_RES 13: note = MeGly
  SITE 13: note = C-terminal N-8-methyl-3-oxa-8-azabicyclo[3.2.1]octanyl
  SITE 1: note = N-terminal acetyl
XNTWKXXXXENXX

SEQ ID NO: 116 - protein, 13 aa, synthetic construct
  MOD_RES 1: note = L-penicillamine
  MOD_RES 4: note = 7-methyl-L-tryptophan
  MOD_RES 5: note = N6-acetyl-L-lysine
  MOD_RES 6: note = L-penicillamine
  MOD_RES 7: note = 4-(2-aminoethoxy)-L-phenylalanine
  MOD_RES 8: note = 3-(2-naphthyl)-L-alanine
  MOD_RES 9: note = 4-aminotetrahydro-2H-pyran-4-carboxylic acid
  MOD_RES 12: note = 3-(3-Pyridyl)-L-alanine
  MOD_RES 13: note = MeGly
  SITE 13: note = C-terminal 2-(2-methoxyethoxy)ethan-1-amino
  SITE 1: note = N-terminal acetyl
XNTWKXXXXENXX

SEQ ID NO: 117 - protein, 13 aa, synthetic construct
  MOD_RES 1: note = L-penicillamine
  MOD_RES 2: note = N4,N4-dimethyl-L-asparagine
  MOD_RES 4: note = 7-methyl-L-tryptophan
  MOD_RES 5: note = (R)-5-amino-5-carboxy-N,N,N-trimethylpentan-1-aminium
  MOD_RES 6: note = L-penicillamine
  MOD_RES 7: note (S)-2-amino-3-(4-(2-(dimethylamino)ethoxy)phenyl)propanoic acid
  MOD_RES 8: note = 3-(2-naphthyl)-L-alanine
  MOD_RES 9: note = 4-aminotetrahydro-2H-pyran-4-carboxylic acid
  MOD_RES 10: note = (R)-5-amino-5-carboxy-N,N,N-trimethylpentan-1-aminium
  MOD_RES 12: note = 3-(3-Pyridyl)-L-alanine
  MOD_RES 13: note = MeGly
  SITE 13: note = C-terminal N,N-dimethylamidyl
  SITE 1: note = N-terminal acetyl
XNTWKXXXXKNXX

SEQ ID NO: 118 - protein, 13 aa, synthetic construct
  MOD_RES 1: note = L-penicillamine
  MOD_RES 2: note = N4,N4-dimethyl-L-asparagine
  MOD_RES 4: note = 7-methyl-L-tryptophan
  MOD_RES 5: note = N5,N5-dimethyl-L-glutamine
  MOD_RES 6: note = L-penicillamine
  MOD_RES 7: note (S)-2-amino-3-(4-(2-(dimethylamino)ethoxy)phenyl)propanoic acid
  MOD_RES 8: note = 3-(2-naphthyl)-L-alanine
  MOD_RES 9: note = 4-aminotetrahydro-2H-pyran-4-carboxylic acid
  MOD_RES 10: note = N5,N5-dimethyl-L-glutamine
  MOD_RES 12: note = 3-(3-Pyridyl)-L-alanine
  MOD_RES 13: note = MeGly
  SITE 1: note = N-terminal acetyl
  SITE 13: note = C-terminal N,N-dimethylamidyl
XNTWXXXXXXNXX

SEQ ID NO: 119 - protein, 13 aa, synthetic construct
  MOD_RES 1: note = L-penicillamine
  MOD_RES 4: note = 7-methyl-L-tryptophan
  MOD_RES 6: note = L-penicillamine
  MOD_RES 7: note (S)-2-amino-3-(4-(2-(dimethylamino)ethoxy)phenyl)propanoic acid
  MOD_RES 8: note = 3-(2-naphthyl)-L-alanine
  MOD_RES 9: note = 4-aminotetrahydro-2H-pyran-4-carboxylic acid
  MOD_RES 12: note = 3-(3-Pyridyl)-L-alanine
  MOD_RES 13: note = MeGly
  SITE 1: note = N-terminal acetyl
  SITE 13: note = C-terminal N,N-dimethylamidyl
XATWAXXXXENXX

SEQ ID NO: 120 - protein, 13 aa, synthetic construct
  MOD_RES 1: note = L-penicillamine
  MOD_RES 2: note = N4,N4-dimethyl-L-asparagine
  MOD_RES 4: note = 7-methyl-L-tryptophan
  MOD_RES 5: note = N5,N5-dimethyl-L-glutamine
  MOD_RES 6: note = L-penicillamine
  MOD_RES 7: note (S)-2-amino-3-(4-(2-(dimethylamino)ethoxy)phenyl)propanoic acid
  MOD_RES 8: note = 3-(2-naphthyl)-L-alanine
  MOD_RES 9: note = 4-aminotetrahydro-2H-pyran-4-carboxylic acid
  MOD_RES 12: note = 3-(3-Pyridyl)-L-alanine
  MOD_RES 13: note = MeGly
  SITE 13: note = C-terminal N,N-dimethylamidyl
  SITE 1: note = N-terminal acetyl
XNTWXXXXXENXX

SEQ ID NO: 121 - protein, 13 aa, synthetic construct
  MOD_RES 1: note = L-penicillamine
  MOD_RES 4: note = 7-methyl-L-tryptophan
  MOD_RES 6: note = L-penicillamine
  MOD_RES 7: note (S)-2-amino-3-(4-(2-(dimethylamino)ethoxy)phenyl)propanoic acid
  MOD_RES 8: note = 3-(2-naphthyl)-L-alanine
  MOD_RES 9: note = 4-aminotetrahydro-2H-pyran-4-carboxylic acid
  MOD_RES 12: note = 3-(3-Pyridyl)-L-alanine
  MOD_RES 13: note = MeGly
  SITE 13: note = C-terminal N,N-dimethylamidyl
  SITE 1: note = N-terminal acetyl
XATWAXXXXANXX

SEQ ID NO: 122 - protein, 13 aa, synthetic construct
  MOD_RES 1: note = L-penicillamine
  MOD_RES 2: note = N4,N4-dimethyl-L-asparagine
  MOD_RES 4: note = 7-methyl-L-tryptophan
  MOD_RES 5: note = N6-acetyl-N6-methyl-L-lysine
  MOD_RES 6: note = L-penicillamine
  MOD_RES 7: note (S)-2-amino-3-(4-(2-(dimethylamino)ethoxy)phenyl)propanoic acid
  MOD_RES 8: note = 3-(2-naphthyl)-L-alanine
  MOD_RES 9: note = 4-aminotetrahydro-2H-pyran-4-carboxylic acid
  MOD_RES 10: note = N6-acetyl-N6-methyl-L-lysine
  MOD_RES 12: note = 3-(3-Pyridyl)-L-alanine
  MOD_RES 13: note = MeGly
  SITE 1: note = N-terminal acetyl
  SITE 13: note = C-terminal N,N-dimethylamidyl
XNTWXXXXXXNXX

SEQ ID NO: 123 - protein, 13 aa, synthetic construct
  MOD_RES 1: note = L-penicillamine
  MOD_RES 4: note = 7-methyl-L-tryptophan
  MOD_RES 5: note = N6-acetyl-L-lysine
  MOD_RES 6: note = L-penicillamine
  MOD_RES 7: note = 4-(2-aminoethoxy)-L-phenylalanine
  MOD_RES 8: note = 3-(2-naphthyl)-L-alanine
  MOD_RES 9: note = 4-aminotetrahydro-2H-pyran-4-carboxylic acid
  MOD_RES 10: note (R)-21-acetyl-26-amino-20-oxo-2,5,8,11,14,17-hexaoxa-21-aza heptacosan-27-oic acid
  MOD_RES 12: note = 3-(3-Pyridyl)-L-alanine
  MOD_RES 13: note = MeGly
  SITE 1: note = N-terminal acetyl
  SITE 13: note = C-terminal amidyl
XNTWKXXXXXNXX

SEQ ID NO: 124 - protein, 13 aa, synthetic construct
  MOD_RES 1: note = L-penicillamine
  MOD_RES 4: note = 7-methyl-L-tryptophan
  MOD_RES 5: note (R)-26-amino-21-methyl-20-oxo-2,5,8,11,14,17-hexaoxa-21-aza heptacosan-27-oic acid
  MOD_RES 6: note = L-penicillamine
  MOD_RES 7: note = 4-(2-aminoethoxy)-L-phenylalanine
  MOD_RES 8: note = 3-(2-naphthyl)-L-alanine
  MOD_RES 9: note = 4-aminotetrahydro-2H-pyran-4-carboxylic acid
  MOD_RES 10: note = N6-acetyl-L-lysine
  MOD_RES 12: note = 3-(3-Pyridyl)-L-alanine
  MOD_RES 13: note = MeGly
  SITE 1: note = N-terminal acetyl
  SITE 13: note = C-terminal amidyl
XNTWXXXXXKNXX

SEQ ID NO: 125 - protein, 14 aa, synthetic construct
  MOD_RES 1: note (R)-2-((R)-4-amino-4-carboxybutanamido)-3-carboxy-N,N,N-tri methylpropan-1-aminium
  MOD_RES 2: note = L-penicillamine
  MOD_RES 5: note = 7-methyl-L-tryptophan
  MOD_RES 6: note = N6-acetyl-L-lysine
  MOD_RES 7: note = L-penicillamine
  MOD_RES 8: note = 4-(2-aminoethoxy)-L-phenylalanine
  MOD_RES 9: note = 3-(2-naphthyl)-L-alanine
  MOD_RES 10: note = 4-aminotetrahydro-2H-pyran-4-carboxylic acid
  MOD_RES 11: note = N6-acetyl-L-lysine
  MOD_RES 13: note = 3-(3-Pyridyl)-L-alanine
  MOD_RES 14: note = MeGly
  SITE 14: note = C-terminal amidyl
  SITE 1: note = N-terminal acetyl
EXNTWKXXXXKNXX

SEQ ID NO: 126 - protein, 14 aa, synthetic construct
  MOD_RES 1: note (R)-2-((R)-4-amino-4-carboxybutanamido)-3-carboxy-N,N,N-tri methylpropan-1-aminium
  MOD_RES 2: note = L-penicillamine
  MOD_RES 5: note = 7-methyl-L-tryptophan
  MOD_RES 6: note = N6-acetyl-L-lysine
  MOD_RES 7: note = L-penicillamine
  MOD_RES 8: note = 4-(2-aminoethoxy)-L-phenylalanine
  MOD_RES 9: note = 3-(2-naphthyl)-L-alanine
  MOD_RES 10: note = 4-aminotetrahydro-2H-pyran-4-carboxylic acid
  MOD_RES 11: note = N6-acetyl-L-lysine
  MOD_RES 13: note = 3-(3-Pyridyl)-L-alanine
  MOD_RES 14: note = MeGly
  SITE 1: note = N-terminal acetyl
  SITE 14: note = C-terminal amidyl
EXNTWKXXXXKNXX

SEQ ID NO: 127 - protein, 13 aa, synthetic construct
  MOD_RES 1: note = L-penicillamine
  MOD_RES 4: note = 7-methyl-L-tryptophan
  MOD_RES 5: note = N6-acetyl-L-lysine
  MOD_RES 6: note = L-penicillamine
  MOD_RES 7: note = 4-(2-aminoethoxy)-L-phenylalanine
  MOD_RES 8: note = 3-(2-naphthyl)-L-alanine
  MOD_RES 9: note = 4-aminotetrahydro-2H-pyran-4-carboxylic acid
  MOD_RES 10: note (R)-2-((R)-4-amino-4-carboxybutanamido)-3-carboxy-N,N,N-tri methylpropan-1-aminium
  MOD_RES 12: note = 3-(3-Pyridyl)-L-alanine
  MOD_RES 13: note = MeGly
  SITE 1: note = N-terminal acetyl
  SITE 13: note = C-terminal amidyl
XNTWKXXXXXNXX

SEQ ID NO: 128 - protein, 13 aa, synthetic construct
  MOD_RES 1: note = L-penicillamine
  MOD_RES 4: note = 7-methyl-L-tryptophan
  MOD_RES 5: note = N6-acetyl-L-lysine
  MOD_RES 6: note = L-penicillamine
  MOD_RES 7: note = 4-(2-aminoethoxy)-L-phenylalanine
  MOD_RES 8: note = 3-(2-naphthyl)-L-alanine
  MOD_RES 9: note = 4-aminotetrahydro-2H-pyran-4-carboxylic acid
  MOD_RES 10: note (R)-2-((R)-4-amino-4-carboxybutanamido)-3-carboxy-N,N,N-tri methylpropan-1-aminium
  MOD_RES 12: note = 3-(3-Pyridyl)-L-alanine
  MOD_RES 13: note = MeGly
  SITE 13: note = C-terminal amidyl
  SITE 1: note = N-terminal acetyl
XNTWKXXXXXNXX

SEQ ID NO: 129 - protein, 13 aa, synthetic construct
  MOD_RES 1: note = L-penicillamine
  MOD_RES 2: note = N4,N4-dimethyl-L-asparagine
  MOD_RES 4: note = 7-methyl-L-tryptophan
  MOD_RES 5: note = (S)-2-amino-4-(N-methylacetamido)butanoic acid
  MOD_RES 6: note = L-penicillamine
  MOD_RES 7: note = 4-(2-aminoethoxy)-L-phenylalanine
  MOD_RES 8: note = 3-(2-naphthyl)-L-alanine
  MOD_RES 9: note = 4-aminotetrahydro-2H-pyran-4-carboxylic acid
  MOD_RES 12: note = 3-(3-Pyridyl)-L-alanine
  MOD_RES 13: note = MeGly
  SITE 1: note = N-terminal acetyl
  SITE 13: note = C-terminal N,N-dimethylamidyl
XNTWXXXXXENXX

SEQ ID NO: 130 - protein, 13 aa, synthetic construct
  MOD_RES 1: note = L-penicillamine
  MOD_RES 2: note = N4,N4-dimethyl-L-asparagine
  MOD_RES 4: note = 7-methyl-L-tryptophan
  MOD_RES 5: note (S)-2-(2-(2-((3-amino-3-carboxypropyl)(methyl)amino)-2-oxoe thoxy)ethoxy)-N,N,N-trimethylethan-1-aminium
  MOD_RES 6: note = L-penicillamine
  MOD_RES 7: note = 4-(2-aminoethoxy)-L-phenylalanine
  MOD_RES 8: note = 3-(2-naphthyl)-L-alanine
  MOD_RES 9: note = 4-aminotetrahydro-2H-pyran-4-carboxylic acid
  MOD_RES 12: note = 3-(3-Pyridyl)-L-alanine
  MOD_RES 13: note = MeGly
  SITE 13: note = C-terminal N,N-dimethylamidyl
  SITE 1: note = N-terminal acetyl
XNTWXXXXXENXX

SEQ ID NO: 131 - protein, 13 aa, synthetic construct
  MOD_RES 1: note = L-penicillamine
  MOD_RES 2: note = N4,N4-dimethyl-L-asparagine
  MOD_RES 4: note = 7-methyl-L-tryptophan
  MOD_RES 5: note (R)-2-(4-(((S)-3-amino-3-carboxypropyl)(methyl)amino)-4-oxo butanamido)-3-carboxy-N,N,N-trimethylpropan-1-aminium
  MOD_RES 6: note = L-penicillamine
  MOD_RES 7: note = 4-(2-aminoethoxy)-L-phenylalanine
  MOD_RES 8: note = 3-(2-naphthyl)-L-alanine
  MOD_RES 9: note = 4-aminotetrahydro-2H-pyran-4-carboxylic acid
  MOD_RES 12: note = 3-(3-Pyridyl)-L-alanine
  MOD_RES 13: note = MeGly
  SITE 1: note = N-terminal acetyl
  SITE 13: note = C-terminal N,N-dimethylamidyl
XNTWXXXXXENXX

SEQ ID NO: 132 - protein, 13 aa, synthetic construct
  MOD_RES 1: note = L-penicillamine
  MOD_RES 4: note = 7-methyl-L-tryptophan
  MOD_RES 5: note = N6-acetyl-L-lysine
  MOD_RES 6: note = L-penicillamine
  MOD_RES 7: note = 4-(2-aminoethoxy)-L-phenylalanine
  MOD_RES 8: note = 3-(2-naphthyl)-L-alanine
  MOD_RES 9: note = 4-aminotetrahydro-2H-pyran-4-carboxylic acid
  MOD_RES 12: note = 3-(3-Pyridyl)-L-alanine
  MOD_RES 13: note = MeGly
  SITE 1: note = N-terminal acetyl
  SITE 13: note = C-terminal 2,5,8,11,14,17,21,24-octaoxaheptacosanyl
XNTWKXXXXENXX

SEQ ID NO: 133 - protein, 13 aa, synthetic construct
  MOD_RES 1: note = L-penicillamine
  MOD_RES 2: note = N4,N4-dimethyl-L-asparagine
  MOD_RES 4: note = 7-methyl-L-tryptophan
  MOD_RES 5: note = N6-acetyl-N6-methyl-L-lysine
  MOD_RES 6: note = L-penicillamine
  MOD_RES 7: note (S)-2-amino-3-(4-(2-(dimethylamino)ethoxy)phenyl)propanoic acid
  MOD_RES 8: note = 3-(2-naphthyl)-L-alanine
  MOD_RES 9: note = 4-aminotetrahydro-2H-pyran-4-carboxylic acid
  MOD_RES 10: note = 3-(Acetylamino)-L-alanine
  MOD_RES 12: note = 3-(3-Pyridyl)-L-alanine
  MOD_RES 13: note = MeGly
  SITE 1: note = N-terminal (6-(trimethylammonio)hexanoyl)amidyl
  SITE 13: note = C-terminal N,N-dimethylamidyl
XNTWXXXXXXNXX

SEQ ID NO: 134 - protein, 13 aa, synthetic construct
  MOD_RES 1: note = L-penicillamine
  MOD_RES 4: note = 7-methyl-L-tryptophan
  MOD_RES 5: note = N6-acetyl-L-lysine
  MOD_RES 6: note = L-penicillamine
  MOD_RES 7: note = 4-(2-aminoethoxy)-L-phenylalanine
  MOD_RES 8: note = 3-(2-naphthyl)-L-alanine
  MOD_RES 9: note = 4-aminotetrahydro-2H-pyran-4-carboxylic acid
  MOD_RES 12: note = 3-(3-Pyridyl)-L-alanine
  MOD_RES 13: note = MeGly
  SITE 13: note = C-terminal 2-(2-(2-trimethylaminium)ethoxy)ethoxy)-amino
  SITE 1: note = N-terminal acetyl
XNTWKXXXXENXX

SEQ ID NO: 135 - protein, 13 aa, synthetic construct
  MOD_RES 1: note = L-penicillamine
  MOD_RES 4: note = 7-methyl-L-tryptophan
  MOD_RES 5: note = N6-acetyl-L-lysine
  MOD_RES 6: note = L-penicillamine
  MOD_RES 7: note = 4-(2-aminoethoxy)-L-phenylalanine
  MOD_RES 8: note = 3-(2-naphthyl)-L-alanine
  MOD_RES 9: note = 4-aminotetrahydro-2H-pyran-4-carboxylic acid
  MOD_RES 12: note = 3-(3-Pyridyl)-L-alanine
  MOD_RES 13: note = MeGly
  SITE 1: note = N-terminal acetyl
  SITE 13: note = C-terminal 1-(4-hydroxy-4-(trifluoromethyl)piperidin-1-yl)
XNTWKXXXXENXX

SEQ ID NO: 136 - protein, 13 aa, synthetic construct
  MOD_RES 1: note = L-penicillamine
  MOD_RES 4: note = 7-methyl-L-tryptophan
  MOD_RES 5: note = N6-acetyl-L-lysine
  MOD_RES 6: note = L-penicillamine
  MOD_RES 7: note = 4-(2-aminoethoxy)-L-phenylalanine
  MOD_RES 8: note = 3-(2-naphthyl)-L-alanine
  MOD_RES 9: note = 4-aminotetrahydro-2H-pyran-4-carboxylic acid
  MOD_RES 12: note = 3-(3-Pyridyl)-L-alanine
  MOD_RES 13: note = MeGly
  SITE 13: note = C-terminal 1-(4,4-difluoropiperidin-1-yl)
  SITE 1: note = N-terminal acetyl
XNTWKXXXXENXX

SEQ ID NO: 137 - protein, 13 aa, synthetic construct
  MOD_RES 1: note = L-penicillamine
  MOD_RES 4: note = 7-methyl-L-tryptophan
  MOD_RES 5: note = N5,N5-dimethyl-L-glutamine
  MOD_RES 6: note = L-penicillamine
  MOD_RES 7: note = 4-(2-aminoethoxy)-L-phenylalanine
  MOD_RES 8: note = 3-(2-naphthyl)-L-alanine
  MOD_RES 9: note = 4-aminotetrahydro-2H-pyran-4-carboxylic acid
  MOD_RES 10: note = N5,N5-dimethyl-L-glutamine
  MOD_RES 12: note = 3-(3-Pyridyl)-L-alanine
  MOD_RES 13: note = MeGly
  SITE 1: note = N-terminal N,N,N-trimethyl-2-(2-(3-carbonylpropoxy)ethoxy)ethan-1-amin ium
  SITE 13: note = C-terminal amidyl
XNTWXXXXXXNXX

SEQ ID NO: 138 - protein, 13 aa, synthetic construct
  MOD_RES 1: note = L-penicillamine
  MOD_RES 4: note = 7-methyl-L-tryptophan
  MOD_RES 5: note = N5,N5-dimethyl-L-glutamine
  MOD_RES 6: note = L-penicillamine
  MOD_RES 7: note = 4-(2-aminoethoxy)-L-phenylalanine
  MOD_RES 8: note = 3-(2-naphthyl)-L-alanine
  MOD_RES 9: note = 4-aminotetrahydro-2H-pyran-4-carboxylic acid
  MOD_RES 10: note = N5,N5-dimethyl-L-glutamine
  MOD_RES 12: note = 3-(3-Pyridyl)-L-alanine
  MOD_RES 13: note = MeGly
  SITE 1: note = N-terminal acetyl
  SITE 13: note = C-terminal amidyl
XNTWXXXXXXNXX

SEQ ID NO: 139 - protein, 13 aa, synthetic construct
  MOD_RES 1: note = L-penicillamine
  MOD_RES 2: note = N4,N4-dimethyl-L-asparagine
  MOD_RES 4: note = 7-methyl-L-tryptophan
  MOD_RES 5: note = N5,N5-dimethyl-L-glutamine
  MOD_RES 6: note = L-penicillamine
  MOD_RES 7: note = 4-(2-aminoethoxy)-L-phenylalanine
  MOD_RES 8: note = 3-(2-naphthyl)-L-alanine
  MOD_RES 9: note = 4-aminotetrahydro-2H-pyran-4-carboxylic acid
  MOD_RES 10: note = N5,N5-dimethyl-L-glutamine
  MOD_RES 12: note = 3-(3-Pyridyl)-L-alanine
  MOD_RES 13: note = MeGly
  SITE 13: note = C-terminal N,N-dimethylamidyl
  SITE 1: note = N-terminal N,N,N-trimethyl-2-(2-(3-carbonylpropoxy)ethoxy)ethan-1-amin ium
XNTWXXXXXXNXX

SEQ ID NO: 140 - protein, 13 aa, synthetic construct
  MOD_RES 1: note = L-penicillamine
  MOD_RES 2: note = N4,N4-dimethyl-L-asparagine
  MOD_RES 4: note = 7-methyl-L-tryptophan
  MOD_RES 5: note = (S)-2-amino-4-(N-methylacetamido)butanoic acid
  MOD_RES 6: note = L-penicillamine
  MOD_RES 7: note = 4-(2-aminoethoxy)-L-phenylalanine
  MOD_RES 8: note = 3-(2-naphthyl)-L-alanine
  MOD_RES 9: note = 4-aminotetrahydro-2H-pyran-4-carboxylic acid
  MOD_RES 10: note = (S)-2-amino-4-(N-methylacetamido)butanoic acid
  MOD_RES 12: note = 3-(3-Pyridyl)-L-alanine
  MOD_RES 13: note = MeGly
  SITE 1: note = N-terminal 1-(N,N,N-trimethylaminium)-3,6,9,12-tetraoxapentadecan-15-o yl
  SITE 13: note = C-terminal N,N-dimethylamidyl
XNTWXXXXXXNXX

SEQ ID NO: 141 - protein, 13 aa, synthetic construct
  MOD_RES 1: note = L-penicillamine
  MOD_RES 2: note = N4,N4-dimethyl-L-asparagine
  MOD_RES 4: note = 7-methyl-L-tryptophan
  MOD_RES 5: note (S)-24-amino-21-methyl-20-oxo-2,5,8,11,14,17-hexaoxa-21-aza pentacosan-25-oic acid
  MOD_RES 6: note = L-penicillamine
  MOD_RES 7: note = 4-(2-aminoethoxy)-L-phenylalanine
  MOD_RES 8: note = 3-(2-naphthyl)-L-alanine
  MOD_RES 9: note = 4-aminotetrahydro-2H-pyran-4-carboxylic acid
  MOD_RES 10: note (S)-24-amino-21-methyl-20-oxo-2,5,8,11,14,17-hexaoxa-21-aza pentacosan-25-oic acid
  MOD_RES 12: note = 3-(3-Pyridyl)-L-alanine
  MOD_RES 13: note = MeGly
  SITE 13: note = C-terminal N,N-dimethylamidyl
  SITE 1: note = N-terminal acetyl
XNTWXXXXXXNXX

SEQ ID NO: 142 - protein, 13 aa, synthetic construct
  MOD_RES 1: note = L-penicillamine
  MOD_RES 2: note = N4,N4-dimethyl-L-asparagine
  MOD_RES 4: note = 7-methyl-L-tryptophan
  MOD_RES 5: note = Aib
  MOD_RES 6: note = L-penicillamine
  MOD_RES 7: note = 4-(2-aminoethoxy)-L-phenylalanine
  MOD_RES 8: note = 3-(2-naphthyl)-L-alanine
  MOD_RES 9: note = 4-aminotetrahydro-2H-pyran-4-carboxylic acid
  MOD_RES 10: note = Aib
  MOD_RES 12: note = 3-(3-Pyridyl)-L-alanine
  MOD_RES 13: note = MeGly
  SITE 13: note = C-terminal N,N-dimethylamidyl
  SITE 1: note = N-terminal N,N,N-trimethyl-2-(2-(3-carbonylpropoxy)ethoxy)ethan-1-amin ium
XNTWXXXXXXNXX

SEQ ID NO: 143 - protein, 14 aa, synthetic construct
  MOD_RES 1: note = 2-amino-N-(carboxymethyl)-N,N-dimethylethan-1-aminium
  MOD_RES 2: note = L-penicillamine
  MOD_RES 3: note = N4,N4-dimethyl-L-asparagine
  MOD_RES 5: note = 7-methyl-L-tryptophan
  MOD_RES 6: note (S)-19-amino-19-carboxy-N,N,N,16-tetramethyl-15-oxo-3,6,9,1 2-tetraoxa-16-azanonadecan-1-aminium
  MOD_RES 7: note = L-penicillamine
  MOD_RES 8: note = 4-(2-aminoethoxy)-L-phenylalanine
  MOD_RES 9: note = 3-(2-naphthyl)-L-alanine
  MOD_RES 10: note = 4-aminotetrahydro-2H-pyran-4-carboxylic acid
  MOD_RES 13: note = 3-(3-Pyridyl)-L-alanine
  MOD_RES 14: note = MeGly
  SITE 14: note = C-terminal N,N-dimethylamidyl
  SITE 1: note = N-terminal 2,5,8,11,14,17-hexaoxaicosan-20-oyl
XXNTWXXXXXENXX

SEQ ID NO: 144 - protein, 14 aa, synthetic construct
  MOD_RES 1: note = (R)-5-amino-5-carboxy-N,N,N-trimethylpentan-1-aminium
  MOD_RES 2: note = L-penicillamine
  MOD_RES 5: note = 7-methyl-L-tryptophan
  MOD_RES 6: note = N6-acetyl-L-lysine
  MOD_RES 7: note = L-penicillamine
  MOD_RES 8: note = 4-(2-aminoethoxy)-L-phenylalanine
  MOD_RES 9: note = 3-(2-naphthyl)-L-alanine
  MOD_RES 10: note = 4-aminotetrahydro-2H-pyran-4-carboxylic acid
  MOD_RES 11: note = N6-acetyl-L-lysine
  MOD_RES 13: note = 3-(3-Pyridyl)-L-alanine
  MOD_RES 14: note = MeGly
  SITE 14: note = C-terminal amidyl
  SITE 1: note = N-terminal 3,3,3-trifluoropropanoyl
KXNTWKXXXXKNXX

SEQ ID NO: 145 - protein, 13 aa, synthetic construct
  MOD_RES 1: note = L-penicillamine
  MOD_RES 2: note = N4,N4-dimethyl-L-asparagine
  MOD_RES 4: note = 7-methyl-L-tryptophan
  MOD_RES 5: note (S)-19-amino-19-carboxy-N,N,N,16-tetramethyl-15-oxo-3,6,9,1 2-tetraoxa-16-azanonadecan-1-aminium
  MOD_RES 6: note = L-penicillamine
  MOD_RES 7: note = 4-(2-aminoethoxy)-L-phenylalanine
  MOD_RES 8: note = 3-(2-naphthyl)-L-alanine
  MOD_RES 9: note = 4-aminotetrahydro-2H-pyran-4-carboxylic acid
  MOD_RES 12: note = 3-(3-Pyridyl)-L-alanine
  MOD_RES 13: note = MeGly
  SITE 1: note = N-terminal 1-(N,N,N-trimethylaminium)-3,6,9,12-tetraoxapentadecan-15-o yl
  SITE 13: note = C-terminal N,N-dimethylamidyl
XNTWXXXXXENXX

SEQ ID NO: 146 - protein, 14 aa, synthetic construct
  MOD_RES 1: note = 2-amino-N-(carboxymethyl)-N,N-dimethylethan-1-aminium
  MOD_RES 2: note = L-penicillamine
  MOD_RES 3: note = N4,N4-dimethyl-L-asparagine
  MOD_RES 5: note = 7-methyl-L-tryptophan
  MOD_RES 6: note = N5,N5-dimethyl-L-glutamine
  MOD_RES 7: note = L-penicillamine
  MOD_RES 8: note = 4-(2-aminoethoxy)-L-phenylalanine
  MOD_RES 9: note = 3-(2-naphthyl)-L-alanine
  MOD_RES 10: note = 4-aminotetrahydro-2H-pyran-4-carboxylic acid
  MOD_RES 11: note = N5,N5-dimethyl-L-glutamine
  MOD_RES 13: note = 3-(3-Pyridyl)-L-alanine
  MOD_RES 14: note = MeGly
  SITE 1: note = N-terminal 2,5,8,11,14-pentaoxahexadecan-16-oyl
  SITE 14: note = C-terminal amidyl
XXNTWXXXXXXNXX

SEQ ID NO: 147 - protein, 13 aa, synthetic construct
  MOD_RES 1: note = L-penicillamine
  MOD_RES 2: note = N4,N4-dimethyl-L-asparagine
  MOD_RES 4: note = 7-methyl-L-tryptophan
  MOD_RES 5: note = N5,N5-dimethyl-L-glutamine
  MOD_RES 6: note = L-penicillamine
  MOD_RES 7: note = 4-(2-aminoethoxy)-L-phenylalanine
  MOD_RES 8: note = 3-(2-naphthyl)-L-alanine
  MOD_RES 9: note = 4-aminotetrahydro-2H-pyran-4-carboxylic acid
  MOD_RES 10: note = N5,N5-dimethyl-L-glutamine
  MOD_RES 12: note = 3-(3-Pyridyl)-L-alanine
  MOD_RES 13: note = MeGly
  SITE 1: note = N-terminal N,N,N-trimethyl-2-(2-(3-carbonylpropoxy)ethoxy)ethan-1-amin ium
  SITE 13: note = C-terminal amidyl
XNTWXXXXXXNXX

SEQ ID NO: 148 - protein, 14 aa, synthetic construct
  MOD_RES 1: note = 2-amino-N-(carboxymethyl)-N,N-dimethylethan-1-aminium
  MOD_RES 2: note = L-penicillamine
  MOD_RES 3: note = N4,N4-dimethyl-L-asparagine
  MOD_RES 5: note = 7-methyl-L-tryptophan
  MOD_RES 6: note = N6-acetyl-N6-methyl-L-lysine
  MOD_RES 7: note = L-penicillamine
  MOD_RES 8: note = 4-(2-aminoethoxy)-L-phenylalanine
  MOD_RES 9: note = 3-(2-naphthyl)-L-alanine
  MOD_RES 10: note = 4-aminotetrahydro-2H-pyran-4-carboxylic acid
  MOD_RES 11: note = N6-acetyl-L-lysine
  MOD_RES 13: note = 3-(3-Pyridyl)-L-alanine
  MOD_RES 14: note = MeGly
  SITE 1: note = N-terminal 2,5,8,11,14-pentaoxahexadecan-16-oyl
  SITE 14: note = C-terminal amidyl
XXNTWXXXXXKNXX

SEQ ID NO: 149 - protein, 13 aa, synthetic construct
  MOD_RES 1: note = L-penicillamine
  MOD_RES 2: note = N4,N4-dimethyl-L-asparagine
  MOD_RES 4: note = 7-methyl-L-tryptophan
  MOD_RES 5: note = N6-acetyl-N6-methyl-L-lysine
  MOD_RES 6: note = L-penicillamine
  MOD_RES 7: note = 4-(2-aminoethoxy)-L-phenylalanine
  MOD_RES 8: note = 3-(2-naphthyl)-L-alanine
  MOD_RES 9: note = 4-aminotetrahydro-2H-pyran-4-carboxylic acid
  MOD_RES 10: note = N6-acetyl-L-lysine
  MOD_RES 12: note = 3-(3-Pyridyl)-L-alanine
  MOD_RES 13: note = MeGly
  SITE 1: note = N-terminal N,N,N-trimethyl-2-(2-(3-carbonylpropoxy)ethoxy)ethan-1-amin ium
  SITE 13: note = C-terminal amidyl
XNTWXXXXXKNXX

SEQ ID NO: 150 - protein, 13 aa, synthetic construct
  MOD_RES 1: note = L-penicillamine
  MOD_RES 2: note = N4,N4-dimethyl-L-asparagine
  MOD_RES 4: note = 7-methyl-L-tryptophan
  MOD_RES 5: note = N6-acetyl-N6-methyl-L-lysine
  MOD_RES 6: note = L-penicillamine
  MOD_RES 7: note = 4-(2-aminoethoxy)-L-phenylalanine
  MOD_RES 8: note = 3-(2-naphthyl)-L-alanine
  MOD_RES 9: note = 4-aminotetrahydro-2H-pyran-4-carboxylic acid
  MOD_RES 10: note = N5,N5-dimethyl-L-glutamine
  MOD_RES 12: note = 3-(3-Pyridyl)-L-alanine
  MOD_RES 13: note = MeGly
  SITE 13: note = C-terminal amidyl
  SITE 1: note = N-terminal N,N,N-trimethyl-2-(2-(3-carbonylpropoxy)ethoxy)ethan-1-amin ium
XNTWXXXXXXNXX

SEQ ID NO: 151 - protein, 13 aa, synthetic construct
  MOD_RES 1: note = L-penicillamine
  MOD_RES 2: note = N4,N4-dimethyl-L-asparagine
  MOD_RES 4: note = 7-methyl-L-tryptophan
  MOD_RES 5: note (R)-2-(4-(((S)-3-amino-3-carboxypropyl)(methyl)amino)-4-oxo butanamido)-3-carboxy-N,N,N-trimethylpropan-1-aminium
  MOD_RES 6: note = L-penicillamine
  MOD_RES 7: note = 4-(2-aminoethoxy)-L-phenylalanine
  MOD_RES 8: note = 3-(2-naphthyl)-L-alanine
  MOD_RES 9: note = 4-aminotetrahydro-2H-pyran-4-carboxylic acid
  MOD_RES 12: note = 3-(3-Pyridyl)-L-alanine
  MOD_RES 13: note = MeGly
  SITE 13: note = C-terminal N,N-dimethylamidyl
  SITE 1: note = N-terminal acetyl
XNTWXXXXXENXX

SEQ ID NO: 152 - protein, 14 aa, synthetic construct
  MOD_RES 1: note = 2-amino-N-(carboxymethyl)-N,N-dimethylethan-1-aminium
  MOD_RES 2: note = L-penicillamine
  MOD_RES 3: note = N4,N4-dimethyl-L-asparagine
  MOD_RES 5: note = 7-methyl-L-tryptophan
  MOD_RES 6: note = N6-acetyl-N6-methyl-L-lysine
  MOD_RES 7: note = L-penicillamine
  MOD_RES 8: note = 4-(2-aminoethoxy)-L-phenylalanine
  MOD_RES 9: note = 3-(2-naphthyl)-L-alanine
  MOD_RES 10: note = 4-aminotetrahydro-2H-pyran-4-carboxylic acid
  MOD_RES 11: note = N5,N5-dimethyl-L-glutamine
  MOD_RES 13: note = 3-(3-Pyridyl)-L-alanine
  MOD_RES 14: note = MeGly
  SITE 1: note = N-terminal 2,5,8,11,14-pentaoxahexadecan-16-oyl
  SITE 14: note = C-terminal amidyl
XXNTWXXXXXXNXX

SEQ ID NO: 153 - protein, 11 aa, synthetic construct
  MOD_RES 1: note = L-penicillamine
  MOD_RES 4: note = 7-methyl-L-tryptophan
  MOD_RES 5: note = N6-acetyl-L-lysine
  MOD_RES 6: note = L-penicillamine
  MOD_RES 7: note = 4-(2-aminoethoxy)-L-phenylalanine
  MOD_RES 8: note = 3-(2-naphthyl)-L-alanine
  MOD_RES 9: note = 4-aminotetrahydro-2H-pyran-4-carboxylic acid
  MOD_RES 10: note = N6-acetyl-L-lysine
  SITE 11: note = C-terminal N,N-dimethylamidyl
  SITE 1: note = N-terminal acetyl
XNTWKXXXXKN

SEQ ID NO: 154 - protein, 13 aa, synthetic construct
  MOD_RES 1: note = L-penicillamine
  MOD_RES 2: note = N4,N4-dimethyl-L-asparagine
  MOD_RES 4: note = 7-methyl-L-tryptophan
  MOD_RES 5: note = N5,N5-dimethyl-L-glutamine
  MOD_RES 6: note = L-penicillamine
  MOD_RES 7: note (S)-2-amino-3-(4-(2-(dimethylamino)ethoxy)phenyl)propanoic acid
  MOD_RES 8: note = 3-(2-naphthyl)-L-alanine
  MOD_RES 9: note = 4-aminotetrahydro-2H-pyran-4-carboxylic acid
  MOD_RES 10: note = N5,N5-dimethyl-L-glutamine
  MOD_RES 12: note = 3-(3-Pyridyl)-L-alanine
  MOD_RES 13: note = MeGly
  SITE 1: note = N-terminal N,N,N-trimethyl-2-(2-(3-carbonylpropoxy)ethoxy)ethan-1-amin ium
  SITE 13: note = C-terminal N,N-dimethylamidyl
XNTWXXXXXXNXX

SEQ ID NO: 155 - protein, 13 aa, synthetic construct
  MOD_RES 1: note = L-penicillamine
  MOD_RES 4: note = 7-methyl-L-tryptophan
  MOD_RES 5: note = N6-acetyl-L-lysine
  MOD_RES 6: note = L-penicillamine
  MOD_RES 7: note = 4-(2-aminoethoxy)-L-phenylalanine
  MOD_RES 8: note = 3-(2-naphthyl)-L-alanine
  MOD_RES 9: note = 4-aminotetrahydro-2H-pyran-4-carboxylic acid
  MOD_RES 10: note = N6-acetyl-L-lysine
  MOD_RES 12: note = 3-(3-Pyridyl)-L-alanine
  MOD_RES 13: note = MeGly
  SITE 1: note = N-terminal acetyl
  SITE 13: note = C-terminal 14-(N,N,N-trimethylaminium)-3,6,9,12-tetraoxatetradecan-1-a mino
XNTWKXXXXKNXX

SEQ ID NO: 156 - protein, 13 aa, synthetic construct
  MOD_RES 1: note = L-penicillamine
  MOD_RES 4: note = 7-methyl-L-tryptophan
  MOD_RES 5: note = N5,N5-dimethyl-L-glutamine
  MOD_RES 6: note = L-penicillamine
  MOD_RES 7: note = 4-(2-aminoethoxy)-L-phenylalanine
  MOD_RES 8: note = 3-(2-naphthyl)-L-alanine
  MOD_RES 9: note = 4-aminotetrahydro-2H-pyran-4-carboxylic acid
  MOD_RES 10: note = N5,N5-dimethyl-L-glutamine
  MOD_RES 12: note = 3-(3-Pyridyl)-L-alanine
  MOD_RES 13: note = MeGly
  SITE 1: note = N-terminal N,N,N-trimethyl-2-(2-(3-carbonylpropoxy)ethoxy)ethan-1-amin ium
  SITE 13: note = C-terminal N,N-dimethylamidyl
XNTWXXXXXXNXX

SEQ ID NO: 157 - protein, 13 aa, synthetic construct
  MOD_RES 1: note = L-penicillamine
  MOD_RES 2: note = N4,N4-dimethyl-L-asparagine
  MOD_RES 4: note = 7-methyl-L-tryptophan
  MOD_RES 5: note = (S)-2-amino-4-(N-methylacetamido)butanoic acid
  MOD_RES 6: note = L-penicillamine
  MOD_RES 7: note = 4-(2-aminoethoxy)-L-phenylalanine
  MOD_RES 8: note = 3-(2-naphthyl)-L-alanine
  MOD_RES 9: note = 4-aminotetrahydro-2H-pyran-4-carboxylic acid
  MOD_RES 10: note = Aib
  MOD_RES 12: note = 3-(3-Pyridyl)-L-alanine
  MOD_RES 13: note = MeGly
  SITE 13: note = C-terminal N,N-dimethylamidyl
  SITE 1: note = N-terminal acetyl
XNTWXXXXXXNXX

SEQ ID NO: 158 - protein, 13 aa, synthetic construct
  MOD_RES 1: note = L-penicillamine
  MOD_RES 2: note = N4,N4-dimethyl-L-asparagine
  MOD_RES 4: note = 7-methyl-L-tryptophan
  MOD_RES 5: note (S)-24-amino-21-methyl-20-oxo-2,5,8,11,14,17-hexaoxa-21-aza pentacosan-25-oic acid
  MOD_RES 6: note = L-penicillamine
  MOD_RES 7: note = 4-(2-aminoethoxy)-L-phenylalanine
  MOD_RES 8: note = 3-(2-naphthyl)-L-alanine
  MOD_RES 9: note = 4-aminotetrahydro-2H-pyran-4-carboxylic acid
  MOD_RES 12: note = 3-(3-Pyridyl)-L-alanine
  MOD_RES 13: note = MeGly
  SITE 13: note = C-terminal N,N-dimethylamidyl
  SITE 1: note = N-terminal acetyl
XNTWXXXXXENXX

SEQ ID NO: 159 - protein, 13 aa, synthetic construct
  MOD_RES 1: note = L-penicillamine
  MOD_RES 2: note = N4,N4-dimethyl-L-asparagine
  MOD_RES 4: note = 7-methyl-L-tryptophan
  MOD_RES 5: note = N5,N5-dimethyl-L-glutamine
  MOD_RES 6: note = L-penicillamine
  MOD_RES 7: note = 4-(2-aminoethoxy)-L-phenylalanine
  MOD_RES 8: note = 3-(2-naphthyl)-L-alanine
  MOD_RES 9: note = 4-aminotetrahydro-2H-pyran-4-carboxylic acid
  MOD_RES 10: note = (S)-2-amino-4-(N-methylacetamido)butanoic acid
  MOD_RES 12: note = 3-(3-Pyridyl)-L-alanine
  MOD_RES 13: note = MeGly
  SITE 13: note = C-terminal N,N-dimethylamidyl
  SITE 1: note = N-terminal N,N,N-trimethyl-2-(2-(3-carbonylpropoxy)ethoxy)ethan-1-amin ium
XNTWXXXXXXNXX

SEQ ID NO: 160 - protein, 13 aa, synthetic construct
  MOD_RES 1: note = L-penicillamine
  MOD_RES 2: note = N4,N4-dimethyl-L-asparagine
  MOD_RES 4: note = 7-methyl-L-tryptophan
  MOD_RES 5: note = (S)-2-amino-4-(N-methylacetamido)butanoic acid
  MOD_RES 6: note = L-penicillamine
  MOD_RES 7: note = 4-(2-aminoethoxy)-L-phenylalanine
  MOD_RES 8: note = 3-(2-naphthyl)-L-alanine
  MOD_RES 9: note = 4-aminotetrahydro-2H-pyran-4-carboxylic acid
  MOD_RES 10: note = (S)-2-amino-4-(N-methylacetamido)butanoic acid
  MOD_RES 12: note = 3-(3-Pyridyl)-L-alanine
  MOD_RES 13: note = MeGly
  SITE 1: note = N-terminal N,N,N-trimethyl-2-(2-(3-carbonylpropoxy)ethoxy)ethan-1-amin ium
  SITE 13: note = C-terminal N,N-dimethylamidyl
XNTWXXXXXXNXX

SEQ ID NO: 161 - protein, 13 aa, synthetic construct
  MOD_RES 1: note = L-penicillamine
  MOD_RES 4: note = 7-methyl-L-tryptophan
  MOD_RES 5: note = N6-acetyl-N6-methyl-L-lysine
  MOD_RES 6: note = L-penicillamine
  MOD_RES 7: note = 4-(2-aminoethoxy)-L-phenylalanine
  MOD_RES 8: note = 3-(2-naphthyl)-L-alanine
  MOD_RES 9: note = 4-aminotetrahydro-2H-pyran-4-carboxylic acid
  MOD_RES 12: note = 3-(3-Pyridyl)-L-alanine
  MOD_RES 13: note = MeGly
  SITE 13: note = C-terminal amidyl
  SITE 1: note = N-terminal N,N,N-trimethyl-2-(2-(3-carbonylpropoxy)ethoxy)ethan-1-amin ium
XNTWXXXXXENXX

SEQ ID NO: 162 - protein, 13 aa, synthetic construct
  MOD_RES 1: note = L-penicillamine
  MOD_RES 4: note = 7-methyl-L-tryptophan
  MOD_RES 5: note = N6-acetyl-N6-methyl-L-lysine
  MOD_RES 6: note = L-penicillamine
  MOD_RES 7: note = 4-(2-aminoethoxy)-L-phenylalanine
  MOD_RES 8: note = 3-(2-naphthyl)-L-alanine
  MOD_RES 9: note = 4-aminotetrahydro-2H-pyran-4-carboxylic acid
  MOD_RES 10: note = N6-acetyl-L-lysine
  MOD_RES 12: note = 3-(3-Pyridyl)-L-alanine
  MOD_RES 13: note = MeGly
  SITE 1: note = N-terminal N,N,N-trimethyl-2-(2-(3-carbonylpropoxy)ethoxy)ethan-1-amin ium
  SITE 13: note = C-terminal amidyl
XNTWXXXXXKNXX

SEQ ID NO: 163 - protein, 14 aa, synthetic construct
  MOD_RES 1: note = (R)-6-amino-6-carboxy-N,N,N-trimethylhexan-1-aminium
  MOD_RES 2: note = L-penicillamine
  MOD_RES 3: note = N4,N4-dimethyl-L-asparagine
  MOD_RES 5: note = 7-methyl-L-tryptophan
  MOD_RES 6: note = N6-acetyl-N6-methyl-L-lysine
  MOD_RES 7: note = L-penicillamine
  MOD_RES 8: note = 4-(2-aminoethoxy)-L-phenylalanine
  MOD_RES 9: note = 3-(2-naphthyl)-L-alanine
  MOD_RES 10: note = 4-aminotetrahydro-2H-pyran-4-carboxylic acid
  MOD_RES 13: note = 3-(3-Pyridyl)-L-alanine
  MOD_RES 14: note = MeGly
  SITE 1: note = N-terminal acetyl
  SITE 14: note = C-terminal N,N-dimethylamidyl
KXNTWXXXXXENXX

SEQ ID NO: 164 - protein, 13 aa, synthetic construct
  MOD_RES 1: note = L-penicillamine
  MOD_RES 2: note = N4,N4-dimethyl-L-asparagine
  MOD_RES 4: note = 7-methyl-L-tryptophan
  MOD_RES 5: note = N6-acetyl-N6-methyl-L-lysine
  MOD_RES 6: note = L-penicillamine
  MOD_RES 7: note (S)-5-(4-(2-amino-2-carboxyethyl)phenoxy)-N,N,N-trimethylpe ntan-1-aminium
  MOD_RES 8: note = 3-(2-naphthyl)-L-alanine
  MOD_RES 9: note = 4-aminotetrahydro-2H-pyran-4-carboxylic acid
  MOD_RES 10: note = N6-acetyl-N6-methyl-L-lysine
  MOD_RES 12: note = 3-(3-Pyridyl)-L-alanine
  MOD_RES 13: note = MeGly
  SITE 1: note = N-terminal N,N,N-trimethyl-2-(2-(3-carbonylpropoxy)ethoxy)ethan-1-amin ium
  SITE 13: note = C-terminal N,N-dimethylamidyl
XNTWXXXXXXNXX

SEQ ID NO: 165 - protein, 13 aa, synthetic construct
  MOD_RES 1: note = L-penicillamine
  MOD_RES 2: note = N4,N4-dimethyl-L-asparagine
  MOD_RES 4: note = 7-methyl-L-tryptophan
  MOD_RES 5: note = N6-acetyl-N6-methyl-L-lysine
  MOD_RES 6: note = L-penicillamine
  MOD_RES 7: note (S)-5-(4-(2-amino-2-carboxyethyl)phenoxy)-N,N,N-trimethylpe ntan-1-aminium
  MOD_RES 8: note = 3-(2-naphthyl)-L-alanine
  MOD_RES 9: note = 4-aminotetrahydro-2H-pyran-4-carboxylic acid
  MOD_RES 12: note = 3-(3-Pyridyl)-L-alanine
  MOD_RES 13: note = MeGly
  SITE 1: note = N-terminal N,N,N-trimethyl-2-(2-(3-carbonylpropoxy)ethoxy)ethan-1-amin ium
  SITE 13: note = C-terminal N,N-dimethylamidyl
XNTWXXXXXENXX

SEQ ID NO: 166 - protein, 13 aa, synthetic construct
  MOD_RES 1: note = L-penicillamine
  MOD_RES 4: note = (S)-2-amino-3-(1,7-dimethyl-1H-indol-3-yl)propanoic acid
  MOD_RES 5: note = N6-acetyl-L-lysine
  MOD_RES 6: note = L-penicillamine
  MOD_RES 7: note = 4-(2-aminoethoxy)-L-phenylalanine
  MOD_RES 8: note = 3-(2-naphthyl)-L-alanine
  MOD_RES 9: note = 4-aminotetrahydro-2H-pyran-4-carboxylic acid
  MOD_RES 12: note = 3-(3-Pyridyl)-L-alanine
  MOD_RES 13: note = MeGly
  SITE 13: note = C-terminal amidyl
  SITE 1: note = N-terminal acetyl
XNTXKXXXXENXX

SEQ ID NO: 167 - protein, 13 aa, synthetic construct
  MOD_RES 1: note = L-penicillamine
  MOD_RES 4: note = 7-methyl-L-tryptophan
  MOD_RES 5: note = N6-acetyl-N6-methyl-L-lysine
  MOD_RES 6: note = L-penicillamine
  MOD_RES 7: note = 4-(2-aminoethoxy)-L-phenylalanine
  MOD_RES 8: note = 3-(2-naphthyl)-L-alanine
  MOD_RES 9: note = 4-aminotetrahydro-2H-pyran-4-carboxylic acid
  MOD_RES 10: note = N6-acetyl-N6-methyl-L-lysine
  MOD_RES 12: note = 3-(3-Pyridyl)-L-alanine
  MOD_RES 13: note = MeGly
  SITE 1: note = N-terminal N,N,N-trimethyl-2-(2-(3-carbonylpropoxy)ethoxy)ethan-1-amin ium
  SITE 13: note = C-terminal amidyl
XNTWXXXXXXNXX

SEQ ID NO: 168 - protein, 13 aa, synthetic construct
  MOD_RES 1: note = L-penicillamine
  MOD_RES 4: note = 7-methyl-L-tryptophan
  MOD_RES 5: note = N5,N5-dimethyl-L-glutamine
  MOD_RES 6: note = L-penicillamine
  MOD_RES 7: note = 4-(2-aminoethoxy)-L-phenylalanine
  MOD_RES 8: note = 3-(2-naphthyl)-L-alanine
  MOD_RES 9: note = 4-aminotetrahydro-2H-pyran-4-carboxylic acid
  MOD_RES 10: note = N6-acetyl-N6-methyl-L-lysine
  MOD_RES 12: note = 3-(3-Pyridyl)-L-alanine
  MOD_RES 13: note = MeGly
  SITE 1: note = N-terminal N,N,N-trimethyl-2-(2-(3-carbonylpropoxy)ethoxy)ethan-1-amin ium
  SITE 13: note = C-terminal amidyl
XNTWXXXXXXNXX

SEQ ID NO: 169 - protein, 13 aa, synthetic construct
  MOD_RES 1: note = L-penicillamine
  MOD_RES 2: note = N4,N4-dimethyl-L-asparagine
  MOD_RES 4: note = 7-methyl-L-tryptophan
  MOD_RES 5: note = N6-acetyl-N6-methyl-L-lysine
  MOD_RES 6: note = L-penicillamine
  MOD_RES 7: note = 4-(2-aminoethoxy)-L-phenylalanine
  MOD_RES 8: note = 3-(2-naphthyl)-L-alanine
  MOD_RES 9: note = 4-aminotetrahydro-2H-pyran-4-carboxylic acid
  MOD_RES 10: note = N6-acetyl-N6-methyl-L-lysine
  MOD_RES 12: note = 3-(3-Pyridyl)-L-alanine
  MOD_RES 13: note = MeGly
  SITE 13: note = C-terminal amidyl
  SITE 1: note = N-terminal N,N,N-trimethyl-2-(2-(3-carbonylpropoxy)ethoxy)ethan-1-amin ium
XNTWXXXXXXNXX

SEQ ID NO: 170 - protein, 13 aa, synthetic construct
  MOD_RES 1: note = L-penicillamine
  MOD_RES 2: note = N4,N4-dimethyl-L-asparagine
  MOD_RES 4: note = 7-methyl-L-tryptophan
  MOD_RES 5: note = (S)-2-amino-4-(N-methylacetamido)butanoic acid
  MOD_RES 6: note = L-penicillamine
  MOD_RES 7: note = 4-(2-aminoethoxy)-L-phenylalanine
  MOD_RES 8: note = 3-(2-naphthyl)-L-alanine
  MOD_RES 9: note = 4-aminotetrahydro-2H-pyran-4-carboxylic acid
  MOD_RES 10: note = (S)-2-amino-4-(N-methylacetamido)butanoic acid
  MOD_RES 12: note = 3-(3-Pyridyl)-L-alanine
  MOD_RES 13: note = MeGly
  SITE 13: note = C-terminal N,N-dimethylamidyl
  SITE 1: note = N-terminal acetyl
XNTWXXXXXXNXX

SEQ ID NO: 171 - protein, 13 aa, synthetic construct
  MOD_RES 1: note = L-penicillamine
  MOD_RES 2: note = N4,N4-dimethyl-L-asparagine
  MOD_RES 4: note = 7-methyl-L-tryptophan
  MOD_RES 5: note = (S)-2-amino-4-(N-methylacetamido)butanoic acid
  MOD_RES 6: note = L-penicillamine
  MOD_RES 7: note = 4-(2-aminoethoxy)-L-phenylalanine
  MOD_RES 8: note = 3-(2-naphthyl)-L-alanine
  MOD_RES 9: note = 4-aminotetrahydro-2H-pyran-4-carboxylic acid
  MOD_RES 10: note = N6-acetyl-N6-methyl-L-lysine
  MOD_RES 12: note = 3-(3-Pyridyl)-L-alanine
  MOD_RES 13: note = MeGly
  SITE 13: note = C-terminal amidyl
  SITE 1: note = N-terminal N,N,N-trimethyl-2-(2-(3-carbonylpropoxy)ethoxy)ethan-1-amin ium
XNTWXXXXXXNXX

SEQ ID NO: 172 - protein, 13 aa, synthetic construct
  MOD_RES 1: note = L-penicillamine
  MOD_RES 2: note = N4,N4-dimethyl-L-asparagine
  MOD_RES 4: note = 7-methyl-L-tryptophan
  MOD_RES 5: note (S)-2-(2-(2-((3-amino-3-carboxypropyl)(methyl)amino)-2-oxoe thoxy)ethoxy)-N,N,N-trimethylethan-1-aminium
  MOD_RES 6: note = L-penicillamine
  MOD_RES 7: note = 4-(2-aminoethoxy)-L-phenylalanine
  MOD_RES 8: note = 3-(2-naphthyl)-L-alanine
  MOD_RES 9: note = 4-aminotetrahydro-2H-pyran-4-carboxylic acid
  MOD_RES 10: note (S)-2-(2-(2-((3-amino-3-carboxypropyl)(methyl)amino)-2-oxoe thoxy)ethoxy)-N,N,N-trimethylethan-1-aminium
  MOD_RES 12: note = 3-(3-Pyridyl)-L-alanine
  MOD_RES 13: note = MeGly
  SITE 13: note = C-terminal N,N-dimethylamidyl
  SITE 1: note = N-terminal 1-(N,N,N-trimethylaminium)-3,6,9,12-tetraoxapentadecan-15-o yl
XNTWXXXXXXNXX

SEQ ID NO: 173 - protein, 13 aa, synthetic construct
  MOD_RES 1: note = L-penicillamine
  MOD_RES 2: note = N4,N4-dimethyl-L-asparagine
  MOD_RES 4: note = 7-methyl-L-tryptophan
  MOD_RES 5: note = N5,N5-dimethyl-L-glutamine
  MOD_RES 6: note = L-penicillamine
  MOD_RES 7: note = 4-(2-aminoethoxy)-L-phenylalanine
  MOD_RES 8: note = 3-(2-naphthyl)-L-alanine
  MOD_RES 9: note = 4-aminotetrahydro-2H-pyran-4-carboxylic acid
  MOD_RES 10: note = (S)-2-amino-4-(N-methylacetamido)butanoic acid
  MOD_RES 12: note = 3-(3-Pyridyl)-L-alanine
  MOD_RES 13: note = MeGly
  SITE 1: note = N-terminal 1-(N,N,N-trimethylaminium)-3,6,9,12-tetraoxapentadecan-15-o yl
  SITE 13: note = C-terminal N,N-dimethylamidyl
XNTWXXXXXXNXX

SEQ ID NO: 174 - protein, 13 aa, synthetic construct
  MOD_RES 1: note = L-penicillamine
  MOD_RES 4: note = 7-methyl-L-tryptophan
  MOD_RES 5: note = N6-acetyl-N6-methyl-L-lysine
  MOD_RES 6: note = L-penicillamine
  MOD_RES 7: note = 4-(2-aminoethoxy)-L-phenylalanine
  MOD_RES 8: note = 3-(2-naphthyl)-L-alanine
  MOD_RES 9: note = 4-aminotetrahydro-2H-pyran-4-carboxylic acid
  MOD_RES 10: note = (S)-2-amino-4-(N-methylacetamido)butanoic acid
  MOD_RES 12: note = 3-(3-Pyridyl)-L-alanine
  MOD_RES 13: note = MeGly
  SITE 13: note = C-terminal amidyl
  SITE 1: note = N-terminal N,N,N-trimethyl-2-(2-(3-carbonylpropoxy)ethoxy)ethan-1-amin ium
XNTWXXXXXXNXX

SEQ ID NO: 175 - protein, 13 aa, synthetic construct
  MOD_RES 1: note = L-penicillamine
  MOD_RES 2: note = N4,N4-dimethyl-L-asparagine
  MOD_RES 4: note = 7-methyl-L-tryptophan
  MOD_RES 5: note (S)-2-(2-(3-((3-amino-3-carboxypropyl)(methyl)amino)-3-oxop ropoxy)ethoxy)-N,N,N-trimethylethan-1-aminium
  MOD_RES 6: note = L-penicillamine
  MOD_RES 7: note = 4-(2-aminoethoxy)-L-phenylalanine
  MOD_RES 8: note = 3-(2-naphthyl)-L-alanine
  MOD_RES 9: note = 4-aminotetrahydro-2H-pyran-4-carboxylic acid
  MOD_RES 10: note (S)-2-(2-(3-((3-amino-3-carboxypropyl)(methyl)amino)-3-oxop ropoxy)ethoxy)-N,N,N-trimethylethan-1-aminium
  MOD_RES 12: note = 3-(3-Pyridyl)-L-alanine
  MOD_RES 13: note = MeGly
  SITE 13: note = C-terminal N,N-dimethylamidyl
  SITE 1: note = N-terminal acetyl
XNTWXXXXXXNXX

SEQ ID NO: 176 - protein, 13 aa, synthetic construct
  MOD_RES 1: note = L-penicillamine
  MOD_RES 2: note = N4,N4-dimethyl-L-asparagine
  MOD_RES 4: note = 7-methyl-L-tryptophan
  MOD_RES 5: note = (S)-2-amino-4-(N-methylacetamido)butanoic acid
  MOD_RES 6: note = L-penicillamine
  MOD_RES 7: note = 4-(2-aminoethoxy)-L-phenylalanine
  MOD_RES 8: note = 3-(2-naphthyl)-L-alanine
  MOD_RES 9: note = 4-aminotetrahydro-2H-pyran-4-carboxylic acid
  MOD_RES 12: note = 3-(3-Pyridyl)-L-alanine
  MOD_RES 13: note = MeGly
  SITE 1: note = N-terminal N,N,N-trimethyl-2-(2-(3-carbonylpropoxy)ethoxy)ethan-1-amin ium
  SITE 13: note = C-terminal amidyl
XNTWXXXXXENXX

SEQ ID NO: 177 - protein, 13 aa, synthetic construct
  MOD_RES 1: note = L-penicillamine
  MOD_RES 2: note = N4,N4-dimethyl-L-asparagine
  MOD_RES 4: note = 7-methyl-L-tryptophan
  MOD_RES 5: note = N6-acetyl-N6-methyl-L-lysine
  MOD_RES 6: note = L-penicillamine
  MOD_RES 7: note = 4-(2-aminoethoxy)-L-phenylalanine
  MOD_RES 8: note = 3-(2-naphthyl)-L-alanine
  MOD_RES 9: note = 4-aminotetrahydro-2H-pyran-4-carboxylic acid
  MOD_RES 10: note = (S)-2-amino-4-(N-methylacetamido)butanoic acid
  MOD_RES 12: note = 3-(3-Pyridyl)-L-alanine
  MOD_RES 13: note = MeGly
  SITE 1: note = N-terminal N,N,N-trimethyl-2-(2-(3-carbonylpropoxy)ethoxy)ethan-1-amin ium
  SITE 13: note = C-terminal N,N-dimethylamidyl
XNTWXXXXXXNXX

SEQ ID NO: 178 - protein, 13 aa, synthetic construct
  MOD_RES 1: note = L-penicillamine
  MOD_RES 4: note = 7-methyl-L-tryptophan
  MOD_RES 5: note = N5,N5-dimethyl-L-glutamine
  MOD_RES 6: note = L-penicillamine
  MOD_RES 7: note = 4-(2-aminoethoxy)-L-phenylalanine
  MOD_RES 8: note = 3-(2-naphthyl)-L-alanine
  MOD_RES 9: note = 4-aminotetrahydro-2H-pyran-4-carboxylic acid
  MOD_RES 10: note = (S)-2-amino-4-(N-methylacetamido)butanoic acid
  MOD_RES 12: note = 3-(3-Pyridyl)-L-alanine
  MOD_RES 13: note = MeGly
  SITE 1: note = N-terminal N,N,N-trimethyl-2-(2-(3-carbonylpropoxy)ethoxy)ethan-1-amin ium
  SITE 13: note = C-terminal amidyl
XNTWXXXXXXNXX

SEQ ID NO: 179 - protein, 13 aa, synthetic construct
  MOD_RES 1: note = L-penicillamine
  MOD_RES 2: note = N4,N4-dimethyl-L-asparagine
  MOD_RES 4: note = 7-methyl-L-tryptophan
  MOD_RES 5: note = N6-acetyl-N6-methyl-L-lysine
  MOD_RES 6: note = L-penicillamine
  MOD_RES 7: note = 4-(2-aminoethoxy)-L-phenylalanine
  MOD_RES 8: note = 3-(2-naphthyl)-L-alanine
  MOD_RES 9: note = 1-amino-3,3-difluorocyclopentane-1-carboxylic acid
  MOD_RES 10: note = (S)-2-amino-4-(N-methylacetamido)butanoic acid
  MOD_RES 12: note = 3-(3-Pyridyl)-L-alanine
  MOD_RES 13: note = MeGly
  SITE 1: note = N-terminal N,N,N-trimethyl-2-(2-(3-carbonylpropoxy)ethoxy)ethan-1-amin ium
  SITE 13: note = C-terminal N,N-dimethylamidyl
XNTWXXXXXXNXX

SEQ ID NO: 180 - protein, 13 aa, synthetic construct
  MOD_RES 1: note = L-penicillamine
  MOD_RES 2: note = N4,N4-dimethyl-L-asparagine
  MOD_RES 4: note = 7-methyl-L-tryptophan
  MOD_RES 5: note = N6-acetyl-N6-methyl-L-lysine
  MOD_RES 6: note = L-penicillamine
  MOD_RES 7: note = 4-(2-aminoethoxy)-L-phenylalanine
  MOD_RES 8: note = 3-(2-naphthyl)-L-alanine
  MOD_RES 9: note = 1-amino-3,3-difluorocyclopentane-1-carboxylic acid
  MOD_RES 10: note = (S)-2-amino-4-(N-methylacetamido)butanoic acid
  MOD_RES 12: note = 3-(3-Pyridyl)-L-alanine
  MOD_RES 13: note = MeGly
  SITE 1: note = N-terminal N,N,N-trimethyl-2-(2-(3-carbonylpropoxy)ethoxy)ethan-1-amin ium
  SITE 13: note = C-terminal N,N-dimethylamidyl
XNTWXXXXXXNXX

SEQ ID NO: 181 - protein, 13 aa, synthetic construct
  MOD_RES 1: note = L-penicillamine
  MOD_RES 2: note = N4,N4-dimethyl-L-asparagine
  MOD_RES 4: note = 7-methyl-L-tryptophan
  MOD_RES 5: note = N6-acetyl-N6-methyl-L-lysine
  MOD_RES 6: note = L-penicillamine
  MOD_RES 7: note (R)-4-(2-(4-(2-amino-2-carboxyethyl)phenoxy)ethyl)-1,1-dime thylpiperidin-1-ium
  MOD_RES 8: note = 3-(2-naphthyl)-L-alanine
  MOD_RES 9: note = 4-aminotetrahydro-2H-pyran-4-carboxylic acid
  MOD_RES 10: note = N6-acetyl-N6-methyl-L-lysine
  MOD_RES 12: note = 3-(3-Pyridyl)-L-alanine
  MOD_RES 13: note = MeGly
  SITE 1: note = N-terminal N,N,N-trimethyl-2-(2-(3-carbonylpropoxy)ethoxy)ethan-1-amin ium
  SITE 13: note = C-terminal N,N-dimethylamidyl
XNTWXXXXXXNXX

SEQ ID NO: 182 - protein, 13 aa, synthetic construct
  MOD_RES 1: note = L-penicillamine
  MOD_RES 2: note = N4,N4-dimethyl-L-asparagine
  MOD_RES 4: note = 7-methyl-L-tryptophan
  MOD_RES 5: note = N6-acetyl-N6-methyl-L-lysine
  MOD_RES 6: note = L-penicillamine
  MOD_RES 7: note = 4-(2-aminoethoxy)-L-phenylalanine
  MOD_RES 8: note = 3-(2-naphthyl)-L-alanine
  MOD_RES 9: note = 4-aminotetrahydro-2H-pyran-4-carboxylic acid
  MOD_RES 10: note = N6-acetyl-N6-methyl-L-lysine
  MOD_RES 12: note = 3-(3-Pyridyl)-L-alanine
  MOD_RES 13: note = MeGly
  SITE 13: note = C-terminal amidyl
  SITE 1: note = N-terminal acetyl
XNTWXXXXXXNXX

SEQ ID NO: 183 - protein, 13 aa, synthetic construct
  MOD_RES 1: note = L-penicillamine
  MOD_RES 2: note = N4,N4-dimethyl-L-asparagine
  MOD_RES 4: note = 7-methyl-L-tryptophan
  MOD_RES 5: note = N6-acetyl-N6-methyl-L-lysine
  MOD_RES 6: note = L-penicillamine
  MOD_RES 7: note (R)-4-(2-(4-(2-amino-2-carboxyethyl)phenoxy)ethyl)-1,1-dime thylpiperidin-1-ium
  MOD_RES 8: note = 3-(2-naphthyl)-L-alanine
  MOD_RES 9: note = 4-aminotetrahydro-2H-pyran-4-carboxylic acid
  MOD_RES 10: note = N6-acetyl-N6-methyl-L-lysine
  MOD_RES 12: note = 3-(3-Pyridyl)-L-alanine
  MOD_RES 13: note = MeGly
  SITE 1: note = N-terminal acetyl
  SITE 13: note = C-terminal N,N-dimethylamidyl
XNTWXXXXXXNXX

SEQ ID NO: 184 - protein, 13 aa, synthetic construct
  MOD_RES 1: note = L-penicillamine
  MOD_RES 2: note = N4,N4-dimethyl-L-asparagine
  MOD_RES 4: note = 7-methyl-L-tryptophan
  MOD_RES 5: note = N6-acetyl-N6-methyl-L-lysine
  MOD_RES 6: note = L-penicillamine
  MOD_RES 7: note (R)-4-(2-(4-(2-amino-2-carboxyethyl)phenoxy)ethyl)-1,1-dime thylpiperidin-1-ium
  MOD_RES 8: note = 3-(2-naphthyl)-L-alanine
  MOD_RES 9: note = 4-aminotetrahydro-2H-pyran-4-carboxylic acid
  MOD_RES 12: note = 3-(3-Pyridyl)-L-alanine
  MOD_RES 13: note = MeGly
  SITE 1: note = N-terminal N,N,N-trimethyl-2-(2-(3-carbonylpropoxy)ethoxy)ethan-1-amin ium
  SITE 13: note = C-terminal N,N-dimethylamidyl
XNTWXXXXXENXX

SEQ ID NO: 185 - protein, 13 aa, synthetic construct
  MOD_RES 1: note = L-penicillamine
  MOD_RES 4: note = 7-methyl-L-tryptophan
  MOD_RES 5: note = (S)-2-amino-4-(N-methylacetamido)butanoic acid
  MOD_RES 6: note = L-penicillamine
  MOD_RES 7: note = 4-(2-aminoethoxy)-L-phenylalanine
  MOD_RES 8: note = 3-(2-naphthyl)-L-alanine
  MOD_RES 9: note = 4-aminotetrahydro-2H-pyran-4-carboxylic acid
  MOD_RES 10: note = N6-acetyl-N6-methyl-L-lysine
  MOD_RES 12: note = 3-(3-Pyridyl)-L-alanine
  MOD_RES 13: note = MeGly
  SITE 13: note = C-terminal amidyl
  SITE 1: note = N-terminal acetyl
XNTWXXXXXXNXX

SEQ ID NO: 186 - protein, 13 aa, synthetic construct
  MOD_RES 1: note = L-penicillamine
  MOD_RES 4: note = 7-methyl-L-tryptophan
  MOD_RES 5: note = N6-acetyl-N6-methyl-L-lysine
  MOD_RES 6: note = L-penicillamine
  MOD_RES 7: note (S)-5-(4-(2-amino-2-carboxyethyl)phenoxy)-N,N,N-trimethylpe ntan-1-aminium
  MOD_RES 8: note = 3-(2-naphthyl)-L-alanine
  MOD_RES 9: note = 4-aminotetrahydro-2H-pyran-4-carboxylic acid
  MOD_RES 10: note = N6-acetyl-N6-methyl-L-lysine
  MOD_RES 12: note = 3-(3-Pyridyl)-L-alanine
  MOD_RES 13: note = MeGly
  SITE 1: note = N-terminal acetyl
  SITE 13: note = C-terminal amidyl
XNTWXXXXXXNXX

SEQ ID NO: 187 - protein, 13 aa, synthetic construct
  MOD_RES 1: note = L-penicillamine
  MOD_RES 2: note = N4,N4-dimethyl-L-asparagine
  MOD_RES 4: note = 7-methyl-L-tryptophan
  MOD_RES 5: note = N6-acetyl-N6-methyl-L-lysine
  MOD_RES 6: note = L-penicillamine
  MOD_RES 7: note (R)-4-(2-(4-(2-amino-2-carboxyethyl)phenoxy)ethyl)-1,1-dime thylpiperidin-1-ium
  MOD_RES 8: note = 3-(2-naphthyl)-L-alanine
  MOD_RES 9: note = 4-aminotetrahydro-2H-pyran-4-carboxylic acid
  MOD_RES 10: note = N6-acetyl-N6-methyl-L-lysine
  MOD_RES 12: note = 3-(3-Pyridyl)-L-alanine
  MOD_RES 13: note = MeGly
  SITE 13: note = C-terminal N,N-dimethylamidyl
  SITE 1: note = N-terminal N,N,N-trimethyl-2-(2-(3-carbonylpropoxy)ethoxy)ethan-1-amin ium
XNTWXXXXXXNXX

SEQ ID NO: 188 - protein, 13 aa, synthetic construct
  MOD_RES 1: note = L-penicillamine
  MOD_RES 4: note = 7-methyl-L-tryptophan
  MOD_RES 5: note = N6-acetyl-N6-methyl-L-lysine
  MOD_RES 6: note = L-penicillamine
  MOD_RES 7: note (S)-5-(4-(2-amino-2-carboxyethyl)phenoxy)-N,N,N-trimethylpe ntan-1-aminium
  MOD_RES 8: note = 3-(2-naphthyl)-L-alanine
  MOD_RES 9: note = 4-aminotetrahydro-2H-pyran-4-carboxylic acid
  MOD_RES 10: note = N6-acetyl-N6-methyl-L-lysine
  MOD_RES 12: note = 3-(3-Pyridyl)-L-alanine
  MOD_RES 13: note = MeGly
  SITE 1: note = N-terminal N,N,N-trimethyl-2-(2-(3-carbonylpropoxy)ethoxy)ethan-1-amin ium
  SITE 13: note = C-terminal amidyl
XNTWXXXXXXNXX

SEQ ID NO: 189 - protein, 13 aa, synthetic construct
  MOD_RES 1: note = L-penicillamine
  MOD_RES 4: note = 7-methyl-L-tryptophan
  MOD_RES 5: note = N6-acetyl-L-lysine
  MOD_RES 6: note = L-penicillamine
  MOD_RES 7: note = 4-(2-aminoethoxy)-L-phenylalanine(NHcPEG3a)
  MOD_RES 8: note = 3-(2-naphthyl)-L-alanine
  MOD_RES 9: note = 4-aminotetrahydro-2H-pyran-4-carboxylic acid
  MOD_RES 10: note = 3-(Acetylamino)-L-alanine
  MOD_RES 12: note = 3-(3-Pyridyl)-L-alanine
  MOD_RES 13: note = MeGly
  SITE 13: note = C-terminal amidyl
  SITE 1: note = N-terminal acetyl
XNTWKXXXXXNXX

SEQ ID NO: 190 - protein, 13 aa, synthetic construct
  MOD_RES 1: note = L-penicillamine
  MOD_RES 2: note = N4,N4-dimethyl-L-asparagine
  MOD_RES 4: note = 7-methyl-L-tryptophan
  MOD_RES 5: note = N6-acetyl-N6-methyl-L-lysine
  MOD_RES 6: note = L-penicillamine
  MOD_RES 7: note (S)-5-(4-(2-amino-2-carboxyethyl)phenoxy)-N,N,N-trimethylpe ntan-1-aminium
  MOD_RES 8: note = 3-(2-naphthyl)-L-alanine
  MOD_RES 9: note = 4-aminotetrahydro-2H-pyran-4-carboxylic acid
  MOD_RES 10: note = N6-acetyl-N6-methyl-L-lysine
  MOD_RES 12: note = 3-(3-Pyridyl)-L-alanine
  MOD_RES 13: note = MeGly
  SITE 13: note = C-terminal N,N-dimethylamidyl
  SITE 1: note = N-terminal acetyl
XNTWXXXXXXNXX

SEQ ID NO: 191 - protein, 13 aa, synthetic construct
  MOD_RES 1: note = L-penicillamine
  MOD_RES 2: note = N4,N4-dimethyl-L-asparagine
  MOD_RES 4: note = 7-methyl-L-tryptophan
  MOD_RES 5: note = (S)-2-amino-4-(N-methylacetamido)butanoic acid
  MOD_RES 6: note = L-penicillamine
  MOD_RES 7: note = 4-(2-aminoethoxy)-L-phenylalanine
  MOD_RES 8: note = 3-(2-naphthyl)-L-alanine
  MOD_RES 9: note = 4-aminotetrahydro-2H-pyran-4-carboxylic acid
  MOD_RES 10: note = (S)-2-amino-4-(N-methylacetamido)butanoic acid
  MOD_RES 12: note = 3-(3-Pyridyl)-L-alanine
  MOD_RES 13: note = MeGly
  SITE 1: note = N-terminal N,N,N-trimethyl-2-(2-(3-carbonylpropoxy)ethoxy)ethan-1-amin ium
  SITE 13: note = C-terminal 2-(2-(2-trimethylaminium)ethoxy)ethoxy)-amino
XNTWXXXXXXNXX

SEQ ID NO: 192 - protein, 13 aa, synthetic construct
  MOD_RES 1: note = L-penicillamine
  MOD_RES 4: note = 7-methyl-L-tryptophan
  MOD_RES 5: note = N6-acetyl-L-lysine
  MOD_RES 6: note = L-penicillamine
  MOD_RES 7: note = 4-(2-aminoethoxy)-L-phenylalanine(NHcPEG3a)
  MOD_RES 8: note = 3-(2-naphthyl)-L-alanine
  MOD_RES 9: note = 4-aminotetrahydro-2H-pyran-4-carboxylic acid
  MOD_RES 10: note = 3-(Acetylamino)-L-alanine
  MOD_RES 12: note = 3-(3-Pyridyl)-L-alanine
  MOD_RES 13: note = MeGly
  SITE 13: note = C-terminal amidyl
  SITE 1: note = N-terminal (6-(trimethylammonio)hexanoyl)amidyl
XNTWKXXXXXNXX

SEQ ID NO: 193 - protein, 13 aa, synthetic construct
  MOD_RES 1: note = L-penicillamine
  MOD_RES 2: note = N4,N4-dimethyl-L-asparagine
  MOD_RES 4: note = 7-methyl-L-tryptophan
  MOD_RES 5: note = N6-acetyl-N6-methyl-L-lysine
  MOD_RES 6: note = L-penicillamine
  MOD_RES 7: note (R)-4-(2-(4-(2-amino-2-carboxyethyl)phenoxy)ethyl)-1,1-dime thylpiperazin-1-ium
  MOD_RES 8: note = 3-(2-naphthyl)-L-alanine
  MOD_RES 9: note = 4-aminotetrahydro-2H-pyran-4-carboxylic acid
  MOD_RES 10: note = N6-acetyl-N6-methyl-L-lysine
  MOD_RES 12: note = 3-(3-Pyridyl)-L-alanine
  MOD_RES 13: note = MeGly
  SITE 13: note = C-terminal N,N-dimethylamidyl
  SITE 1: note = N-terminal N,N,N-trimethyl-2-(2-(3-carbonylpropoxy)ethoxy)ethan-1-amin ium
XNTWXXXXXXNXX

SEQ ID NO: 194 - protein, 13 aa, synthetic construct
  MOD_RES 1: note = L-penicillamine
  MOD_RES 4: note = 7-methyl-L-tryptophan
  MOD_RES 5: note = N6-acetyl-L-lysine
  MOD_RES 6: note = L-penicillamine
  MOD_RES 7: note (R)-4-(2-(4-(2-amino-2-carboxyethyl)phenoxy)ethyl)-1,1-dime thylpiperidin-1-ium
  MOD_RES 8: note = 3-(2-naphthyl)-L-alanine
  MOD_RES 9: note = 4-aminotetrahydro-2H-pyran-4-carboxylic acid
  MOD_RES 10: note = N6-acetyl-L-lysine
  MOD_RES 12: note = 3-(3-Pyridyl)-L-alanine
  MOD_RES 13: note = MeGly
  SITE 1: note = N-terminal acetyl
  SITE 13: note = C-terminal amidyl
XNTWKXXXXKNXX

SEQ ID NO: 195 - protein, 13 aa, synthetic construct
  MOD_RES 1: note = L-penicillamine
  MOD_RES 4: note = 7-methyl-L-tryptophan
  MOD_RES 5: note = N6-acetyl-L-lysine
  MOD_RES 6: note = L-penicillamine
  MOD_RES 7: note (R)-4-(2-(4-(2-amino-2-carboxyethyl)phenoxy)ethyl)-1,1-dime thylpiperidin-1-ium
  MOD_RES 8: note = 3-(2-naphthyl)-L-alanine
  MOD_RES 9: note = 4-aminotetrahydro-2H-pyran-4-carboxylic acid
  MOD_RES 10: note = N6-acetyl-L-lysine
  MOD_RES 12: note = 3-(3-Pyridyl)-L-alanine
  MOD_RES 13: note = MeGly
  SITE 1: note = N-terminal N,N,N-trimethyl-2-(2-(3-carbonylpropoxy)ethoxy)ethan-1-amin ium
  SITE 13: note = C-terminal amidyl
XNTWKXXXXKNXX

SEQ ID NO: 196 - protein, 13 aa, synthetic construct
  MOD_RES 1: note = L-penicillamine
  MOD_RES 2: note = N4,N4-dimethyl-L-asparagine
  MOD_RES 4: note = 7-methyl-L-tryptophan
  MOD_RES 5: note (S)-2-(2-(3-((3-amino-3-carboxypropyl)(methyl)amino)-3-oxop ropoxy)ethoxy)-N,N,N-trimethylethan-1-aminium
  MOD_RES 6: note = L-penicillamine
  MOD_RES 7: note = 4-(2-aminoethoxy)-L-phenylalanine
  MOD_RES 8: note = 3-(2-naphthyl)-L-alanine
  MOD_RES 9: note = 4-aminotetrahydro-2H-pyran-4-carboxylic acid
  MOD_RES 10: note = (S)-2-amino-4-(N-methylacetamido)butanoic acid
  MOD_RES 12: note = 3-(3-Pyridyl)-L-alanine
  MOD_RES 13: note = MeGly
  SITE 1: note = N-terminal N,N,N-trimethyl-2-(2-(3-carbonylpropoxy)ethoxy)ethan-1-amin ium
  SITE 13: note = C-terminal N,N-dimethylamidyl
XNTWXXXXXXNXX

SEQ ID NO: 197 - protein, 14 aa, synthetic construct
  MOD_RES 1: note = 2-amino-N-(carboxymethyl)-N,N-dimethylethan-1-aminium
  MOD_RES 2: note = L-penicillamine
  MOD_RES 3: note = N4,N4-dimethyl-L-asparagine
  MOD_RES 5: note = 7-methyl-L-tryptophan
  MOD_RES 6: note = N6-acetyl-N6-methyl-L-lysine
  MOD_RES 7: note = L-penicillamine
  MOD_RES 8: note (R)-4-(2-(4-(2-amino-2-carboxyethyl)phenoxy)ethyl)-1,1-dime thylpiperidin-1-ium
  MOD_RES 9: note = 3-(2-naphthyl)-L-alanine
  MOD_RES 10: note = 4-aminotetrahydro-2H-pyran-4-carboxylic acid
  MOD_RES 11: note = (S)-2-amino-4-(N-methylacetamido)butanoic acid
  MOD_RES 13: note = 3-(3-Pyridyl)-L-alanine
  MOD_RES 14: note = MeGly
  SITE 14: note = C-terminal N,N-dimethylamidyl
  SITE 1: note = N-terminal 2,5,8,11,14-pentaoxahexadecan-16-oyl
XXNTWXXXXXXNXX

SEQ ID NO: 198 - protein, 13 aa, synthetic construct
  MOD_RES 1: note = L-penicillamine
  MOD_RES 2: note = N4,N4-dimethyl-L-asparagine
  MOD_RES 4: note = 7-methyl-L-tryptophan
  MOD_RES 5: note = N6-acetyl-N6-methyl-L-lysine
  MOD_RES 6: note = L-penicillamine
  MOD_RES 7: note (S)-4-(2-(4-(2-amino-2-carboxyethyl)phenoxy)ethyl)-4-methyl morpholin-4-ium
  MOD_RES 8: note = 3-(2-naphthyl)-L-alanine
  MOD_RES 9: note = 4-aminotetrahydro-2H-pyran-4-carboxylic acid
  MOD_RES 10: note = N6-acetyl-N6-methyl-L-lysine
  MOD_RES 12: note = 3-(3-Pyridyl)-L-alanine
  MOD_RES 13: note = MeGly
  SITE 1: note = N-terminal N,N,N-trimethyl-2-(2-(3-carbonylpropoxy)ethoxy)ethan-1-amin ium
  SITE 13: note = C-terminal N,N-dimethylamidyl
XNTWXXXXXXNXX

SEQ ID NO: 199 - protein, 13 aa, synthetic construct
  MOD_RES 1: note = L-penicillamine
  MOD_RES 2: note = N4,N4-dimethyl-L-asparagine
  MOD_RES 4: note = 7-methyl-L-tryptophan
  MOD_RES 5: note = N6-acetyl-N6-methyl-L-lysine
  MOD_RES 6: note = L-penicillamine
  MOD_RES 7: note (S)-2-(2-(4-(2-amino-2-carboxyethyl)phenoxy)ethoxy)-N,N,N-t rimethylethan-1-aminium
  MOD_RES 8: note = 3-(2-naphthyl)-L-alanine
  MOD_RES 9: note = 4-aminotetrahydro-2H-pyran-4-carboxylic acid
  MOD_RES 10: note = N6-acetyl-N6-methyl-L-lysine
  MOD_RES 12: note = 3-(3-Pyridyl)-L-alanine
  MOD_RES 13: note = MeGly
  SITE 13: note = C-terminal N,N-dimethylamidyl
  SITE 1: note = N-terminal N,N,N-trimethyl-2-(2-(3-carbonylpropoxy)ethoxy)ethan-1-amin ium
XNTWXXXXXXNXX

SEQ ID NO: 200 - protein, 13 aa, synthetic construct
  MOD_RES 1: note = L-penicillamine
  MOD_RES 4: note = 7-methyl-L-tryptophan
  MOD_RES 5: note = N6-acetyl-N6-methyl-L-lysine
  MOD_RES 6: note = L-penicillamine
  MOD_RES 7: note (R)-4-(2-(4-(2-amino-2-carboxyethyl)phenoxy)ethyl)-1,1-dime thylpiperidin-1-ium
  MOD_RES 8: note = 3-(2-naphthyl)-L-alanine
  MOD_RES 9: note = 4-aminotetrahydro-2H-pyran-4-carboxylic acid
  MOD_RES 10: note = N6-acetyl-N6-methyl-L-lysine
  MOD_RES 12: note = 3-(3-Pyridyl)-L-alanine
  MOD_RES 13: note = MeGly
  SITE 13: note = C-terminal amidyl
  SITE 1: note = N-terminal acetyl
XNTWXXXXXXNXX

SEQ ID NO: 201 - protein, 13 aa, synthetic construct
  MOD_RES 1: note = L-penicillamine
  MOD_RES 4: note = 7-methyl-L-tryptophan
  MOD_RES 5: note = N6-acetyl-N6-methyl-L-lysine
  MOD_RES 6: note = L-penicillamine
  MOD_RES 7: note (R)-4-(2-(4-(2-amino-2-carboxyethyl)phenoxy)ethyl)-1,1-dime thylpiperidin-1-ium
  MOD_RES 8: note = 3-(2-naphthyl)-L-alanine
  MOD_RES 9: note = 4-aminotetrahydro-2H-pyran-4-carboxylic acid
  MOD_RES 10: note = N6-acetyl-N6-methyl-L-lysine
  MOD_RES 12: note = 3-(3-Pyridyl)-L-alanine
  MOD_RES 13: note = MeGly
  SITE 1: note = N-terminal N,N,N-trimethyl-2-(2-(3-carbonylpropoxy)ethoxy)ethan-1-amin ium
  SITE 13: note = C-terminal amidyl
XNTWXXXXXXNXX

SEQ ID NO: 202 - protein, 13 aa, synthetic construct
  MOD_RES 1: note = L-penicillamine
  MOD_RES 2: note = N4,N4-dimethyl-L-asparagine
  MOD_RES 4: note = 7-methyl-L-tryptophan
  MOD_RES 5: note = N6-acetyl-N6-methyl-L-lysine
  MOD_RES 6: note = L-penicillamine
  MOD_RES 7: note 2-((4-((S)-2-amino-2-carboxyethyl)phenoxy)methyl)-4,4-dimet hylmorpholin-4-ium
  MOD_RES 8: note = 3-(2-naphthyl)-L-alanine
  MOD_RES 9: note = 4-aminotetrahydro-2H-pyran-4-carboxylic acid
  MOD_RES 10: note = N6-acetyl-N6-methyl-L-lysine
  MOD_RES 12: note = 3-(3-Pyridyl)-L-alanine
  MOD_RES 13: note = MeGly
  SITE 13: note = C-terminal N,N-dimethylamidyl
  SITE 1: note = N-terminal N,N,N-trimethyl-2-(2-(3-carbonylpropoxy)ethoxy)ethan-1-amin ium
XNTWXXXXXXNXX

SEQ ID NO: 203 - protein, 13 aa, synthetic construct
  MOD_RES 1: note = L-penicillamine
  MOD_RES 2: note = N4,N4-dimethyl-L-asparagine
  MOD_RES 4: note = 7-methyl-L-tryptophan
  MOD_RES 5: note = N6-acetyl-N6-methyl-L-lysine
  MOD_RES 6: note = L-penicillamine
  MOD_RES 7: note = 4-(2-aminoethoxy)-L-phenylalanine(BisMEP)
  MOD_RES 8: note = 3-(2-naphthyl)-L-alanine
  MOD_RES 9: note = 4-aminotetrahydro-2H-pyran-4-carboxylic acid
  MOD_RES 10: note = N6-acetyl-N6-methyl-L-lysine
  MOD_RES 12: note = 3-(3-Pyridyl)-L-alanine
  MOD_RES 13: note = MeGly
  SITE 13: note = C-terminal N,N-dimethylamidyl
  SITE 1: note = N-terminal N,N,N-trimethyl-2-(2-(3-carbonylpropoxy)ethoxy)ethan-1-amin ium
XNTWXXXXXXNXX

SEQ ID NO: 204 - protein, 13 aa, synthetic construct
  MOD_RES 1: note = L-penicillamine
  MOD_RES 4: note = 7-methyl-L-tryptophan
  MOD_RES 5: note = N6-acetyl-L-lysine
  MOD_RES 6: note = L-penicillamine
  MOD_RES 7: note = 4-(2-aminoethoxy)-L-phenylalanine(MEP)
  MOD_RES 8: note = 3-(2-naphthyl)-L-alanine
  MOD_RES 9: note = 4-aminotetrahydro-2H-pyran-4-carboxylic acid
  MOD_RES 10: note = 3-(Acetylamino)-L-alanine
  MOD_RES 12: note = 3-(3-Pyridyl)-L-alanine
  MOD_RES 13: note = MeGly
  SITE 1: note = N-terminal (6-(trimethylammonio)hexanoyl)amidyl
  SITE 13: note = C-terminal amidyl
XNTWKXXXXXNXX

SEQ ID NO: 205 - protein, 13 aa, synthetic construct
  MOD_RES 1: note = L-penicillamine
  MOD_RES 4: note = 7-methyl-L-tryptophan
  MOD_RES 5: note = N6-acetyl-L-lysine
  MOD_RES 6: note = L-penicillamine
  MOD_RES 7: note = 4-(2-aminoethoxy)-L-phenylalanine(BisMEP)
  MOD_RES 8: note = 3-(2-naphthyl)-L-alanine
  MOD_RES 9: note = 4-aminotetrahydro-2H-pyran-4-carboxylic acid
  MOD_RES 10: note = 3-(Acetylamino)-L-alanine
  MOD_RES 12: note = 3-(3-Pyridyl)-L-alanine
  MOD_RES 13: note = MeGly
  SITE 13: note = C-terminal amidyl
  SITE 1: note = N-terminal (6-(trimethylammonio)hexanoyl)amidyl
XNTWKXXXXXNXX

SEQ ID NO: 206 - protein, 13 aa, synthetic construct
  MOD_RES 1: note = L-penicillamine
  MOD_RES 2: note = N4,N4-dimethyl-L-asparagine
  MOD_RES 4: note = 7-methyl-L-tryptophan
  MOD_RES 5: note = N6-acetyl-N6-methyl-L-lysine
  MOD_RES 6: note = L-penicillamine
  MOD_RES 7: note = 4-(2-aminoethoxy)-L-phenylalanine(NsCh)
  MOD_RES 8: note = 3-(2-naphthyl)-L-alanine
  MOD_RES 9: note = 4-aminotetrahydro-2H-pyran-4-carboxylic acid
  MOD_RES 10: note = N6-acetyl-N6-methyl-L-lysine
  MOD_RES 12: note = 3-(3-Pyridyl)-L-alanine
  MOD_RES 13: note = MeGly
  SITE 13: note = C-terminal N,N-dimethylamidyl
  SITE 1: note = N-terminal N,N,N-trimethyl-2-(2-(3-carbonylpropoxy)ethoxy)ethan-1-amin ium
XNTWXXXXXXNXX

SEQ ID NO: 207 - protein, 13 aa, synthetic construct
  MOD_RES 1: note = L-penicillamine
  MOD_RES 2: note = N4,N4-dimethyl-L-asparagine
  MOD_RES 4: note = 7-methyl-L-tryptophan
  MOD_RES 5: note = N6-acetyl-N6-methyl-L-lysine
  MOD_RES 6: note = L-penicillamine
  MOD_RES 7: note = 4-(2-aminoethoxy)-L-phenylalanine(AcCh)
  MOD_RES 8: note = 3-(2-naphthyl)-L-alanine
  MOD_RES 9: note = 4-aminotetrahydro-2H-pyran-4-carboxylic acid
  MOD_RES 10: note = N6-acetyl-N6-methyl-L-lysine
  MOD_RES 12: note = 3-(3-Pyridyl)-L-alanine
  MOD_RES 13: note = MeGly
  SITE 13: note = C-terminal N,N-dimethylamidyl
  SITE 1: note = N-terminal N,N,N-trimethyl-2-(2-(3-carbonylpropoxy)ethoxy)ethan-1-amin ium
XNTWXXXXXXNXX

SEQ ID NO: 208 - protein, 13 aa, synthetic construct
  MOD_RES 1: note = L-penicillamine
  MOD_RES 2: note = N4,N4-dimethyl-L-asparagine
  MOD_RES 4: note = 7-methyl-L-tryptophan
  MOD_RES 5: note = N6-acetyl-N6-methyl-L-lysine
  MOD_RES 6: note = L-penicillamine
  MOD_RES 7: note = 4-(2-aminoethoxy)-L-phenylalanine((Ch)cPEG3a)
  MOD_RES 8: note = 3-(2-naphthyl)-L-alanine
  MOD_RES 9: note = 4-aminotetrahydro-2H-pyran-4-carboxylic acid
  MOD_RES 10: note = N6-acetyl-N6-methyl-L-lysine
  MOD_RES 12: note = 3-(3-Pyridyl)-L-alanine
  MOD_RES 13: note = MeGly
  SITE 13: note = C-terminal N,N-dimethylamidyl
  SITE 1: note = N-terminal N,N,N-trimethyl-2-(2-(3-carbonylpropoxy)ethoxy)ethan-1-amin ium
XNTWXXXXXXNXX

SEQ ID NO: 209 - protein, 13 aa, synthetic construct
  MOD_RES 1: note = L-penicillamine
  MOD_RES 2: note = N4,N4-dimethyl-L-asparagine
  MOD_RES 4: note = 7-methyl-L-tryptophan
  MOD_RES 5: note = N6-acetyl-N6-methyl-L-lysine
  MOD_RES 6: note = L-penicillamine
  MOD_RES 7: note (R)-4-(2-(4-(2-amino-2-carboxyethyl)phenoxy)ethyl)-1,1-dime thylpiperidin-1-ium
  MOD_RES 8: note = 3-(2-naphthyl)-L-alanine
  MOD_RES 9: note = 4-aminotetrahydro-2H-pyran-4-carboxylic acid
  MOD_RES 10: note = (S)-2-amino-4-(N-methylacetamido)butanoic acid
  MOD_RES 12: note = 3-(3-Pyridyl)-L-alanine
  MOD_RES 13: note = MeGly
  SITE 1: note = N-terminal N,N,N-trimethyl-2-(2-(3-carbonylpropoxy)ethoxy)ethan-1-amin ium
  SITE 13: note = C-terminal N,N-dimethylamidyl
XNTWXXXXXXNXX

SEQ ID NO: 210 - protein, 13 aa, synthetic construct
  MOD_RES 1: note = L-penicillamine
  MOD_RES 2: note = N4,N4-dimethyl-L-asparagine
  MOD_RES 4: note = 7-methyl-L-tryptophan
  MOD_RES 5: note = N6-acetyl-N6-methyl-L-lysine
  MOD_RES 6: note = L-penicillamine
  MOD_RES 7: note (S)-4-((4-(2-amino-2-carboxyethyl)phenoxy)methyl)-N,N,N-tri methylcyclohexan-1-aminium
  MOD_RES 8: note = 3-(2-naphthyl)-L-alanine
  MOD_RES 9: note = 4-aminotetrahydro-2H-pyran-4-carboxylic acid
  MOD_RES 10: note = N6-acetyl-N6-methyl-L-lysine
  MOD_RES 12: note = 3-(3-Pyridyl)-L-alanine
  MOD_RES 13: note = MeGly
  SITE 13: note = C-terminal N,N-dimethylamidyl
  SITE 1: note = N-terminal N,N,N-trimethyl-2-(2-(3-carbonylpropoxy)ethoxy)ethan-1-amin ium
XNTWXXXXXXNXX

SEQ ID NO: 211 - protein, 13 aa, synthetic construct
  MOD_RES 1: note = L-penicillamine
  MOD_RES 2: note = N4,N4-dimethyl-L-asparagine
  MOD_RES 4: note = 7-methyl-L-tryptophan
  MOD_RES 5: note = N6-acetyl-N6-methyl-L-lysine
  MOD_RES 6: note = L-penicillamine
  MOD_RES 7: note = 4-(2-aminoethoxy)-L-phenylalanine(NHCh)
  MOD_RES 8: note = 3-(2-naphthyl)-L-alanine
  MOD_RES 9: note = 4-aminotetrahydro-2H-pyran-4-carboxylic acid
  MOD_RES 10: note = N6-acetyl-N6-methyl-L-lysine
  MOD_RES 12: note = 3-(3-Pyridyl)-L-alanine
  MOD_RES 13: note = MeGly
  SITE 1: note = N-terminal N,N,N-trimethyl-2-(2-(3-carbonylpropoxy)ethoxy)ethan-1-amin ium
  SITE 13: note = C-terminal N,N-dimethylamidyl
XNTWXXXXXXNXX

SEQ ID NO: 212 - protein, 13 aa, synthetic construct
  MOD_RES 1: note = L-penicillamine
  MOD_RES 2: note = N4,N4-dimethyl-L-asparagine
  MOD_RES 4: note = 7-methyl-L-tryptophan
  MOD_RES 5: note = N6-acetyl-N6-methyl-L-lysine
  MOD_RES 6: note = L-penicillamine
  MOD_RES 7: note (R)-4-(2-(4-(2-amino-2-carboxyethyl)phenoxy)ethyl)-1,1-dime thylpiperidin-1-ium
  MOD_RES 8: note = 3-(2-naphthyl)-L-alanine
  MOD_RES 9: note = 4-aminotetrahydro-2H-pyran-4-carboxylic acid
  MOD_RES 10: note = (S)-2-amino-4-(N-methylacetamido)butanoic acid
  MOD_RES 12: note = 3-(3-Pyridyl)-L-alanine
  MOD_RES 13: note = MeGly
  SITE 1: note = N-terminal N,N,N-trimethyl-2-(2-(3-carbonylpropoxy)ethoxy)ethan-1-amin ium
  SITE 13: note = C-terminal N,N-dimethylamidyl
XNTWXXXXXXNXX

SEQ ID NO: 213 - protein, 14 aa, synthetic construct
  MOD_RES 1: note (S)-2-(4-(((R)-5-amino-5-carboxypentyl)amino)-4-oxobutanami do)-3-carboxy-N,N,N-trimethylpropan-1-aminium
  MOD_RES 2: note = L-penicillamine
  MOD_RES 3: note = N4,N4-dimethyl-L-asparagine
  MOD_RES 5: note = 7-methyl-L-tryptophan
  MOD_RES 6: note = N6-acetyl-N6-methyl-L-lysine
  MOD_RES 7: note = L-penicillamine
  MOD_RES 8: note (R)-4-(2-(4-(2-amino-2-carboxyethyl)phenoxy)ethyl)-1,1-dime thylpiperidin-1-ium
  MOD_RES 9: note = 3-(2-naphthyl)-L-alanine
  MOD_RES 10: note = 4-aminotetrahydro-2H-pyran-4-carboxylic acid
  MOD_RES 11: note = (S)-2-amino-4-(N-methylacetamido)butanoic acid
  MOD_RES 13: note = 3-(3-Pyridyl)-L-alanine
  MOD_RES 14: note = MeGly
  SITE 14: note = C-terminal N,N-dimethylamidyl
  SITE 1: note = N-terminal acetyl
KXNTWXXXXXXNXX

SEQ ID NO: 214 - protein, 13 aa, synthetic construct
  MOD_RES 1: note = L-penicillamine
  MOD_RES 2: note = N4,N4-dimethyl-L-asparagine
  MOD_RES 4: note = 7-methyl-L-tryptophan
  MOD_RES 5: note (R)-2-(4-(((S)-3-amino-3-carboxypropyl)(methyl)amino)-4-oxo butanamido)-3-carboxy-N,N,N-trimethylpropan-1-aminium
  MOD_RES 6: note = L-penicillamine
  MOD_RES 7: note (R)-4-(2-(4-(2-amino-2-carboxyethyl)phenoxy)ethyl)-1,1-dime thylpiperidin-1-ium
  MOD_RES 8: note = 3-(2-naphthyl)-L-alanine
  MOD_RES 9: note = 4-aminotetrahydro-2H-pyran-4-carboxylic acid
  MOD_RES 10: note = N6-acetyl-N6-methyl-L-lysine
  MOD_RES 12: note = 3-(3-Pyridyl)-L-alanine
  MOD_RES 13: note = MeGly
  SITE 1: note = N-terminal acetyl
  SITE 13: note = C-terminal N,N-dimethylamidyl
XNTWXXXXXXNXX

SEQ ID NO: 215 - protein, 13 aa, synthetic construct
  MOD_RES 1: note = L-penicillamine
  MOD_RES 2: note = N4,N4-dimethyl-L-asparagine
  MOD_RES 4: note = 7-methyl-L-tryptophan
  MOD_RES 5: note = N6-acetyl-N6-methyl-L-lysine
  MOD_RES 6: note = L-penicillamine
  MOD_RES 7: note 3-((4-((S)-2-amino-2-carboxyethyl)phenoxy)methyl)-1,1-dimet hylpiperidin-1-ium
  MOD_RES 8: note = 3-(2-naphthyl)-L-alanine
  MOD_RES 9: note = 4-aminotetrahydro-2H-pyran-4-carboxylic acid
  MOD_RES 10: note = N6-acetyl-N6-methyl-L-lysine
  MOD_RES 12: note = 3-(3-Pyridyl)-L-alanine
  MOD_RES 13: note = MeGly
  SITE 13: note = C-terminal N,N-dimethylamidyl
  SITE 1: note = N-terminal N,N,N-trimethyl-2-(2-(3-carbonylpropoxy)ethoxy)ethan-1-amin ium
XNTWXXXXXXNXX

SEQ ID NO: 216 - protein, 14 aa, synthetic construct
  MOD_RES 1: note = (R)-5-amino-5-carboxy-N,N,N-trimethylpentan-1-aminium
  MOD_RES 2: note = L-penicillamine
  MOD_RES 3: note = N4,N4-dimethyl-L-asparagine
  MOD_RES 5: note = 7-methyl-L-tryptophan
  MOD_RES 6: note = N6-acetyl-N6-methyl-L-lysine
  MOD_RES 7: note = L-penicillamine
  MOD_RES 8: note (R)-4-(2-(4-(2-amino-2-carboxyethyl)phenoxy)ethyl)-1,1-dime thylpiperidin-1-ium
  MOD_RES 9: note = 3-(2-naphthyl)-L-alanine
  MOD_RES 10: note = 4-aminotetrahydro-2H-pyran-4-carboxylic acid
  MOD_RES 11: note = N6-acetyl-N6-methyl-L-lysine
  MOD_RES 13: note = 3-(3-Pyridyl)-L-alanine
  MOD_RES 14: note = MeGly
  SITE 1: note = N-terminal acetyl
  SITE 14: note = C-terminal N,N-dimethylamidyl
KXNTWXXXXXXNXX

SEQ ID NO: 217 - protein, 13 aa, synthetic construct
  MOD_RES 1: note = L-penicillamine
  MOD_RES 2: note = N4,N4-dimethyl-L-asparagine
  MOD_RES 4: note = 7-methyl-L-tryptophan
  MOD_RES 5: note (R)-2-(2-(3-((5-amino-5-carboxypentyl)(methyl)amino)-3-oxop ropoxy)ethoxy)-N,N,N-trimethylethan-1-aminium
  MOD_RES 6: note = L-penicillamine
  MOD_RES 7: note (R)-4-(2-(4-(2-amino-2-carboxyethyl)phenoxy)ethyl)-1,1-dime thylpiperidin-1-ium
  MOD_RES 8: note = 3-(2-naphthyl)-L-alanine
  MOD_RES 9: note = 4-aminotetrahydro-2H-pyran-4-carboxylic acid
  MOD_RES 10: note = N6-acetyl-N6-methyl-L-lysine
  MOD_RES 12: note = 3-(3-Pyridyl)-L-alanine
  MOD_RES 13: note = MeGly
  SITE 13: note = C-terminal N,N-dimethylamidyl
  SITE 1: note = N-terminal acetyl
XNTWXXXXXXNXX

SEQ ID NO: 218 - protein, 13 aa, synthetic construct
  MOD_RES 1: note = L-penicillamine
  MOD_RES 2: note = N4,N4-dimethyl-L-asparagine
  MOD_RES 4: note = 7-methyl-L-tryptophan
  MOD_RES 5: note = N6-acetyl-N6-methyl-L-lysine
  MOD_RES 6: note = L-penicillamine
  MOD_RES 7: note (R)-4-(2-(4-(2-amino-2-carboxyethyl)phenoxy)ethyl)-1,1-dime thylpiperidin-1-ium
  MOD_RES 8: note = 3-(2-naphthyl)-L-alanine
  MOD_RES 9: note = 4-aminotetrahydro-2H-pyran-4-carboxylic acid
  MOD_RES 10: note (R)-2-(2-(3-((5-amino-5-carboxypentyl)(methyl)amino)-3-oxop ropoxy)ethoxy)-N,N,N-trimethylethan-1-aminium
  MOD_RES 12: note = 3-(3-Pyridyl)-L-alanine
  MOD_RES 13: note = MeGly
  SITE 1: note = N-terminal acetyl
  SITE 13: note = C-terminal N,N-dimethylamidyl
XNTWXXXXXXNXX

SEQ ID NO: 219 - protein, 13 aa, synthetic construct
  MOD_RES 1: note = L-penicillamine
  MOD_RES 2: note = N4,N4-dimethyl-L-asparagine
  MOD_RES 4: note = 7-methyl-L-tryptophan
  MOD_RES 5: note = N6-acetyl-N6-methyl-L-lysine
  MOD_RES 6: note = L-penicillamine
  MOD_RES 7: note (S)-5-(4-(2-amino-2-carboxyethyl)phenoxy)-N,N,N-trimethylpe ntan-1-aminium
  MOD_RES 8: note = 3-(2-naphthyl)-L-alanine
  MOD_RES 9: note = 4-aminotetrahydro-2H-pyran-4-carboxylic acid
  MOD_RES 10: note = N6-acetyl-N6-methyl-L-lysine
  MOD_RES 12: note = 3-(3-Pyridyl)-L-alanine
  MOD_RES 13: note = MeGly
  SITE 1: note = N-terminal acetyl
  SITE 13: note = C-terminal (2-(2-(2-(trimethylaminium)ethoxy)ethoxy)ethyl)carbamoyl
XNTWXXXXXXNXX

SEQ ID NO: 220 - protein, 13 aa, synthetic construct
  MOD_RES 1: note = L-penicillamine
  MOD_RES 2: note = N4,N4-dimethyl-L-asparagine
  MOD_RES 4: note = 7-methyl-L-tryptophan
  MOD_RES 5: note = N6-acetyl-N6-methyl-L-lysine
  MOD_RES 6: note = L-penicillamine
  MOD_RES 7: note (S)-5-(4-(2-amino-2-carboxyethyl)phenoxy)-N,N,N-trimethylpe ntan-1-aminium
  MOD_RES 8: note = 3-(2-naphthyl)-L-alanine
  MOD_RES 9: note = 4-aminotetrahydro-2H-pyran-4-carboxylic acid
  MOD_RES 10: note = N6-acetyl-N6-methyl-L-lysine
  MOD_RES 12: note = 3-(3-Pyridyl)-L-alanine
  MOD_RES 13: note = MeGly
  SITE 13: note = C-terminal (2-(2-(2-(trimethylaminium)ethoxy)ethoxy)ethyl)carbamoyl
  SITE 1: note = N-terminal N,N,N-trimethyl-2-(2-(3-carbonylpropoxy)ethoxy)ethan-1-amin ium
XNTWXXXXXXNXX

SEQ ID NO: 221 - protein, 13 aa, synthetic construct
  MOD_RES 1: note = L-penicillamine
  MOD_RES 2: note = N4,N4-dimethyl-L-asparagine
  MOD_RES 4: note = 7-methyl-L-tryptophan
  MOD_RES 5: note = N6-acetyl-N6-methyl-L-lysine
  MOD_RES 6: note = L-penicillamine
  MOD_RES 7: note = 4-(2-aminoethoxy)-L-phenylalanine(BisMEPa)
  MOD_RES 8: note = 3-(2-naphthyl)-L-alanine
  MOD_RES 9: note = 4-aminotetrahydro-2H-pyran-4-carboxylic acid
  MOD_RES 10: note = N6-acetyl-N6-methyl-L-lysine
  MOD_RES 12: note = 3-(3-Pyridyl)-L-alanine
  MOD_RES 13: note = MeGly
  SITE 1: note = N-terminal N,N,N-trimethyl-2-(2-(3-carbonylpropoxy)ethoxy)ethan-1-amin ium
  SITE 13: note = C-terminal N,N-dimethylamidyl
XNTWXXXXXXNXX

SEQ ID NO: 222 - protein, 13 aa, synthetic construct
  MOD_RES 1: note = L-penicillamine
  MOD_RES 2: note = N4,N4-dimethyl-L-asparagine
  MOD_RES 4: note = 7-methyl-L-tryptophan
  MOD_RES 5: note = N6-acetyl-N6-methyl-L-lysine
  MOD_RES 6: note = L-penicillamine
  MOD_RES 7: note (S)-4-((4-(2-amino-2-carboxyethyl)phenoxy)methyl)-N,N,N-tri methylcyclohexan-1-aminium
  MOD_RES 8: note = 3-(2-naphthyl)-L-alanine
  MOD_RES 9: note = 4-aminotetrahydro-2H-pyran-4-carboxylic acid
  MOD_RES 10: note = N6-acetyl-N6-methyl-L-lysine
  MOD_RES 12: note = 3-(3-Pyridyl)-L-alanine
  MOD_RES 13: note = MeGly
  SITE 13: note = C-terminal N,N-dimethylamidyl
  SITE 1: note = N-terminal N,N,N-trimethyl-2-(2-(3-carbonylpropoxy)ethoxy)ethan-1-amin ium
XNTWXXXXXXNXX

SEQ ID NO: 223 - protein, 13 aa, synthetic construct
  MOD_RES 1: note = L-penicillamine
  MOD_RES 2: note = N4,N4-dimethyl-L-asparagine
  MOD_RES 4: note = 7-methyl-L-tryptophan
  MOD_RES 5: note = N6-acetyl-N6-methyl-L-lysine
  MOD_RES 6: note = L-penicillamine
  MOD_RES 7: note (S)-4-(2-(2-(2-(4-(2-amino-2-carboxyethyl)phenoxy)ethoxy)et hoxy)ethyl)-4-methylmorpholin-4-ium
  MOD_RES 8: note = 3-(2-naphthyl)-L-alanine
  MOD_RES 9: note = 4-aminotetrahydro-2H-pyran-4-carboxylic acid
  MOD_RES 10: note = N6-acetyl-N6-methyl-L-lysine
  MOD_RES 12: note = 3-(3-Pyridyl)-L-alanine
  MOD_RES 13: note = MeGly
  SITE 1: note = N-terminal N,N,N-trimethyl-2-(2-(3-carbonylpropoxy)ethoxy)ethan-1-amin ium
  SITE 13: note = C-terminal N,N-dimethylamidyl
XNTWXXXXXXNXX

SEQ ID NO: 224 - protein, 13 aa, synthetic construct
  MOD_RES 1: note = L-penicillamine
  MOD_RES 2: note = N4,N4-dimethyl-L-asparagine
  MOD_RES 4: note = 7-methyl-L-tryptophan
  MOD_RES 5: note = N6-acetyl-N6-methyl-L-lysine
  MOD_RES 6: note = L-penicillamine
  MOD_RES 7: note (S)-1-(2-(2-(2-(4-(2-amino-2-carboxyethyl)phenoxy)ethoxy)et hoxy)ethyl)-1,4-dimethylpiperazin-1-ium
  MOD_RES 8: note = 3-(2-naphthyl)-L-alanine
  MOD_RES 9: note = 4-aminotetrahydro-2H-pyran-4-carboxylic acid
  MOD_RES 10: note = N6-acetyl-N6-methyl-L-lysine
  MOD_RES 12: note = 3-(3-Pyridyl)-L-alanine
  MOD_RES 13: note = MeGly
  SITE 13: note = C-terminal N,N-dimethylamidyl
  SITE 1: note = N-terminal N,N,N-trimethyl-2-(2-(3-carbonylpropoxy)ethoxy)ethan-1-amin ium
XNTWXXXXXXNXX

SEQ ID NO: 225 - protein, 14 aa, synthetic construct
  MOD_RES 1: note = 2-amino-N-(carboxymethyl)-N,N-dimethylethan-1-aminium
  MOD_RES 2: note = L-penicillamine
  MOD_RES 3: note = N4,N4-dimethyl-L-asparagine
  MOD_RES 5: note = 7-methyl-L-tryptophan
  MOD_RES 6: note = N6-acetyl-N6-methyl-L-lysine
  MOD_RES 7: note = L-penicillamine
  MOD_RES 8: note (R)-4-(2-(4-(2-amino-2-carboxyethyl)phenoxy)ethyl)-1,1-dime thylpiperidin-1-ium
  MOD_RES 9: note = 3-(2-naphthyl)-L-alanine
  MOD_RES 10: note = 4-aminotetrahydro-2H-pyran-4-carboxylic acid
  MOD_RES 11: note = N6-acetyl-N6-methyl-L-lysine
  MOD_RES 13: note = 3-(3-Pyridyl)-L-alanine
  MOD_RES 14: note = MeGly
  SITE 14: note = C-terminal N,N-dimethylamidyl
  SITE 1: note = N-terminal 2,5,8,11,14-pentaoxahexadecan-16-oyl
XXNTWXXXXXXNXX

SEQ ID NO: 226 - protein, 13 aa, synthetic construct
  MOD_RES 1: note = L-penicillamine
  MOD_RES 2: note = N4,N4-dimethyl-L-asparagine
  MOD_RES 4: note = 7-methyl-L-tryptophan
  MOD_RES 5: note = N6-acetyl-N6-methyl-L-lysine
  MOD_RES 6: note = L-penicillamine
  MOD_RES 7: note (S)-4-(4-(2-amino-2-carboxyethyl)phenoxy)-N,N,N-trimethylbu tan-1-aminium
  MOD_RES 8: note = 3-(2-naphthyl)-L-alanine
  MOD_RES 9: note = 4-aminotetrahydro-2H-pyran-4-carboxylic acid
  MOD_RES 10: note = N6-acetyl-N6-methyl-L-lysine
  MOD_RES 12: note = 3-(3-Pyridyl)-L-alanine
  MOD_RES 13: note = MeGly
  SITE 13: note = C-terminal N,N-dimethylamidyl
  SITE 1: note = N-terminal N,N,N-trimethyl-2-(2-(3-carbonylpropoxy)ethoxy)ethan-1-amin ium
XNTWXXXXXXNXX

SEQ ID NO: 227 - protein, 13 aa, synthetic construct
  MOD_RES 1: note = L-penicillamine
  MOD_RES 2: note = N4,N4-dimethyl-L-asparagine
  MOD_RES 4: note = 7-methyl-L-tryptophan
  MOD_RES 5: note = N6-acetyl-N6-methyl-L-lysine
  MOD_RES 6: note = L-penicillamine
  MOD_RES 7: note (S)-4-(4-(2-amino-2-carboxyethyl)phenoxy)-N-(2-methoxyethyl )-N,N-dimethylbutan-1-aminium
  MOD_RES 8: note = 3-(2-naphthyl)-L-alanine
  MOD_RES 9: note = 4-aminotetrahydro-2H-pyran-4-carboxylic acid
  MOD_RES 10: note = N6-acetyl-N6-methyl-L-lysine
  MOD_RES 12: note = 3-(3-Pyridyl)-L-alanine
  MOD_RES 13: note = MeGly
  SITE 13: note = C-terminal N,N-dimethylamidyl
  SITE 1: note = N-terminal N,N,N-trimethyl-2-(2-(3-carbonylpropoxy)ethoxy)ethan-1-amin ium
XNTWXXXXXXNXX

SEQ ID NO: 228 - protein, 13 aa, synthetic construct
  MOD_RES 1: note = L-penicillamine
  MOD_RES 2: note = N4,N4-dimethyl-L-asparagine
  MOD_RES 4: note = 7-methyl-L-tryptophan
  MOD_RES 5: note = N6-acetyl-N6-methyl-L-lysine
  MOD_RES 6: note = L-penicillamine
  MOD_RES 7: note (S)-2-(4-(2-amino-2-carboxyethyl)phenoxy)-N-(2-methoxyethyl )-N,N-dimethylethan-1-aminium
  MOD_RES 8: note = 3-(2-naphthyl)-L-alanine
  MOD_RES 9: note = 4-aminotetrahydro-2H-pyran-4-carboxylic acid
  MOD_RES 10: note = N6-acetyl-N6-methyl-L-lysine
  MOD_RES 12: note = 3-(3-Pyridyl)-L-alanine
  MOD_RES 13: note = MeGly
  SITE 1: note = N-terminal N,N,N-trimethyl-2-(2-(3-carbonylpropoxy)ethoxy)ethan-1-amin ium
  SITE 13: note = C-terminal N,N-dimethylamidyl
XNTWXXXXXXNXX

SEQ ID NO: 229 - protein, 13 aa, synthetic construct
  MOD_RES 1: note = L-penicillamine
  MOD_RES 2: note = N4,N4-dimethyl-L-asparagine
  MOD_RES 4: note = 7-methyl-L-tryptophan
  MOD_RES 5: note = N6-acetyl-N6-methyl-L-lysine
  MOD_RES 6: note = L-penicillamine
  MOD_RES 7: note (S)-3-(4-(2-amino-2-carboxyethyl)phenoxy)-N,N,N-trimethylpr opan-1-aminium
  MOD_RES 8: note = 3-(2-naphthyl)-L-alanine
  MOD_RES 9: note = 4-aminotetrahydro-2H-pyran-4-carboxylic acid
  MOD_RES 10: note = N6-acetyl-N6-methyl-L-lysine
  MOD_RES 12: note = 3-(3-Pyridyl)-L-alanine
  MOD_RES 13: note = MeGly
  SITE 1: note = N-terminal N,N,N-trimethyl-2-(2-(3-carbonylpropoxy)ethoxy)ethan-1-amin ium
  SITE 13: note = C-terminal N,N-dimethylamidyl
XNTWXXXXXXNXX

SEQ ID NO: 230 - protein, 13 aa, synthetic construct
  MOD_RES 1: note = L-penicillamine
  MOD_RES 2: note = N4,N4-dimethyl-L-asparagine
  MOD_RES 4: note = 7-methyl-L-tryptophan
  MOD_RES 5: note = N6-acetyl-N6-methyl-L-lysine
  MOD_RES 6: note = L-penicillamine
  MOD_RES 7: note (S)-3-(4-(2-amino-2-carboxyethyl)phenoxy)-N,N,N-trimethylpr opan-1-aminium
  MOD_RES 8: note = 3-(2-naphthyl)-L-alanine
  MOD_RES 9: note = 4-aminotetrahydro-2H-pyran-4-carboxylic acid
  MOD_RES 10: note = N6-acetyl-N6-methyl-L-lysine
  MOD_RES 12: note = 3-(3-Pyridyl)-L-alanine
  MOD_RES 13: note = MeGly
  SITE 13: note = C-terminal N,N-dimethylamidyl
  SITE 1: note = N-terminal N,N,N-trimethyl-2-(2-(3-carbonylpropoxy)ethoxy)ethan-1-amin ium
XNTWXXXXXXNXX

SEQ ID NO: 231 - protein, 13 aa, synthetic construct
  MOD_RES 1: note = L-penicillamine
  MOD_RES 2: note = N4,N4-dimethyl-L-asparagine
  MOD_RES 4: note = 7-methyl-L-tryptophan
  MOD_RES 5: note = N6-acetyl-N6-methyl-L-lysine
  MOD_RES 6: note = L-penicillamine
  MOD_RES 7: note (S)-1-(2-(4-(2-amino-2-carboxyethyl)phenoxy)ethyl)pyridin-1 -ium
  MOD_RES 8: note = 3-(2-naphthyl)-L-alanine
  MOD_RES 9: note = 4-aminotetrahydro-2H-pyran-4-carboxylic acid
  MOD_RES 10: note = N6-acetyl-N6-methyl-L-lysine
  MOD_RES 12: note = 3-(3-Pyridyl)-L-alanine
  MOD_RES 13: note = MeGly
  SITE 13: note = C-terminal N,N-dimethylamidyl
  SITE 1: note = N-terminal N,N,N-trimethyl-2-(2-(3-carbonylpropoxy)ethoxy)ethan-1-amin ium
XNTWXXXXXXNXX

SEQ ID NO: 232 - protein, 14 aa, synthetic construct
  MOD_RES 1: note (R)-2-(2-(2-amino-2-carboxyethoxy)ethoxy)-N,N,N-trimethylet han-1-aminium
  MOD_RES 2: note = L-penicillamine
  MOD_RES 3: note = N4,N4-dimethyl-L-asparagine
  MOD_RES 5: note = 7-methyl-L-tryptophan
  MOD_RES 6: note = N6-acetyl-N6-methyl-L-lysine
  MOD_RES 7: note = L-penicillamine
  MOD_RES 8: note (R)-4-(2-(4-(2-amino-2-carboxyethyl)phenoxy)ethyl)-1,1-dime thylpiperidin-1-ium
  MOD_RES 9: note = 3-(2-naphthyl)-L-alanine
  MOD_RES 10: note = 4-aminotetrahydro-2H-pyran-4-carboxylic acid
  MOD_RES 11: note = N6-acetyl-N6-methyl-L-lysine
  MOD_RES 13: note = 3-(3-Pyridyl)-L-alanine
  MOD_RES 14: note = MeGly
  SITE 1: note = N-terminal acetyl
  SITE 14: note = C-terminal N,N-dimethylamidyl
XXNTWXXXXXXNXX

SEQ ID NO: 233 - protein, 13 aa, synthetic construct
  MOD_RES 1: note = L-penicillamine
  MOD_RES 2: note = N4,N4-dimethyl-L-asparagine
  MOD_RES 4: note = 7-methyl-L-tryptophan
  MOD_RES 5: note = N6-acetyl-N6-methyl-L-lysine
  MOD_RES 6: note = L-penicillamine
  MOD_RES 7: note (R)-4-(2-(4-(2-amino-2-carboxyethyl)phenoxy)ethyl)-1,1-dime thylpiperidin-1-ium
  MOD_RES 8: note = 3-(2-naphthyl)-L-alanine
  MOD_RES 9: note = 4-aminotetrahydro-2H-pyran-4-carboxylic acid
  MOD_RES 10: note = N6-acetyl-L-lysine
  MOD_RES 12: note = 3-(3-Pyridyl)-L-alanine
  MOD_RES 13: note = MeGly
  SITE 13: note = C-terminal N,N-dimethylamidyl
  SITE 1: note = N-terminal N,N,N-trimethyl-2-(2-(3-carbonylpropoxy)ethoxy)ethan-1-amin ium
XNTWXXXXXKNXX

SEQ ID NO: 234 - protein, 13 aa, synthetic construct
  MOD_RES 1: note = L-penicillamine
  MOD_RES 2: note = N4,N4-dimethyl-L-asparagine
  MOD_RES 4: note = 7-methyl-L-tryptophan
  MOD_RES 5: note = N6-acetyl-N6-methyl-L-lysine
  MOD_RES 6: note = L-penicillamine
  MOD_RES 7: note = 4-(2-aminoethoxy)-L-phenylalanine(MePrpa)
  MOD_RES 8: note = 3-(2-naphthyl)-L-alanine
  MOD_RES 9: note = 4-aminotetrahydro-2H-pyran-4-carboxylic acid
  MOD_RES 10: note = N6-acetyl-N6-methyl-L-lysine
  MOD_RES 12: note = 3-(3-Pyridyl)-L-alanine
  MOD_RES 13: note = MeGly
  SITE 1: note = N-terminal N,N,N-trimethyl-2-(2-(3-carbonylpropoxy)ethoxy)ethan-1-amin ium
  SITE 13: note = C-terminal N,N-dimethylamidyl
XNTWXXXXXXNXX

SEQ ID NO: 235 - protein, 13 aa, synthetic construct
  MOD_RES 1: note = L-penicillamine
  MOD_RES 4: note = 7-methyl-L-tryptophan
  MOD_RES 5: note = N6-acetyl-L-lysine
  MOD_RES 6: note = L-penicillamine
  MOD_RES 7: note (S)-2-(1-(2-(4-(2-amino-2-carboxyethyl)phenoxy)ethyl)-1H-1, 2,3-triazol-4-yl)-N,N,N-trimethylethan-1-aminium
  MOD_RES 8: note = 3-(2-naphthyl)-L-alanine
  MOD_RES 9: note = 4-aminotetrahydro-2H-pyran-4-carboxylic acid
  MOD_RES 10: note = N6-acetyl-L-lysine
  MOD_RES 12: note = 3-(3-Pyridyl)-L-alanine
  MOD_RES 13: note = MeGly
  SITE 1: note = N-terminal acetyl
  SITE 13: note = C-terminal amidyl
XNTWKXXXXKNXX

SEQ ID NO: 236 - protein, 13 aa, synthetic construct
  MOD_RES 1: note = L-penicillamine
  MOD_RES 2: note = N4,N4-dimethyl-L-asparagine
  MOD_RES 4: note = 7-methyl-L-tryptophan
  MOD_RES 5: note = N6-acetyl-N6-methyl-L-lysine
  MOD_RES 6: note = L-penicillamine
  MOD_RES 7: note = (S)-9-(4-(2-amino-2-carboxyethyl)phenoxy)nonanoic acid
  MOD_RES 8: note = 3-(2-naphthyl)-L-alanine
  MOD_RES 9: note = 4-aminotetrahydro-2H-pyran-4-carboxylic acid
  MOD_RES 10: note = N6-acetyl-N6-methyl-L-lysine
  MOD_RES 12: note = 3-(3-Pyridyl)-L-alanine
  MOD_RES 13: note = MeGly
  SITE 1: note = N-terminal N,N,N-trimethyl-2-(2-(3-carbonylpropoxy)ethoxy)ethan-1-amin ium
  SITE 13: note = C-terminal N,N-dimethylamidyl
XNTWXXXXXXNXX

SEQ ID NO: 237 - protein, 13 aa, synthetic construct
  MOD_RES 1: note = L-penicillamine
  MOD_RES 2: note = N4,N4-dimethyl-L-asparagine
  MOD_RES 4: note = 7-methyl-L-tryptophan
  MOD_RES 5: note = N6-acetyl-N6-methyl-L-lysine
  MOD_RES 6: note = L-penicillamine
  MOD_RES 7: note = 4-(2-aminoethoxy)-L-phenylalanine(NMePEG2a)
  MOD_RES 8: note = 3-(2-naphthyl)-L-alanine
  MOD_RES 9: note = 4-aminotetrahydro-2H-pyran-4-carboxylic acid
  MOD_RES 10: note = N6-acetyl-N6-methyl-L-lysine
  MOD_RES 12: note = 3-(3-Pyridyl)-L-alanine
  MOD_RES 13: note = MeGly
  SITE 1: note = N-terminal N,N,N-trimethyl-2-(2-(3-carbonylpropoxy)ethoxy)ethan-1-amin ium
  SITE 13: note = C-terminal N,N-dimethylamidyl
XNTWXXXXXXNXX

SEQ ID NO: 238 - protein, 13 aa, synthetic construct
  MOD_RES 1: note = L-penicillamine
  MOD_RES 2: note = N4,N4-dimethyl-L-asparagine
  MOD_RES 4: note = 7-methyl-L-tryptophan
  MOD_RES 5: note = N6-acetyl-N6-methyl-L-lysine
  MOD_RES 6: note = L-penicillamine
  MOD_RES 7: note = 4-(2-aminoethoxy)-L-phenylalanine(PEG2a)
  MOD_RES 8: note = 3-(2-naphthyl)-L-alanine
  MOD_RES 9: note = 4-aminotetrahydro-2H-pyran-4-carboxylic acid
  MOD_RES 10: note = N6-acetyl-N6-methyl-L-lysine
  MOD_RES 12: note = 3-(3-Pyridyl)-L-alanine
  MOD_RES 13: note = MeGly
  SITE 1: note = N-terminal N,N,N-trimethyl-2-(2-(3-carbonylpropoxy)ethoxy)ethan-1-amin ium
  SITE 13: note = C-terminal N,N-dimethylamidyl
XNTWXXXXXXNXX

SEQ ID NO: 239 - protein, 13 aa, synthetic construct
  MOD_RES 1: note = L-penicillamine
  MOD_RES 2: note = N4,N4-dimethyl-L-asparagine
  MOD_RES 4: note = 7-methyl-L-tryptophan
  MOD_RES 5: note = N6-acetyl-N6-methyl-L-lysine
  MOD_RES 6: note = L-penicillamine
  MOD_RES 7: note = 4-(2-aminoethoxy)-L-phenylalanine(NMe2mPEG3)
  MOD_RES 8: note = 3-(2-naphthyl)-L-alanine
  MOD_RES 9: note = 4-aminotetrahydro-2H-pyran-4-carboxylic acid
  MOD_RES 10: note = N6-acetyl-N6-methyl-L-lysine
  MOD_RES 12: note = 3-(3-Pyridyl)-L-alanine
  MOD_RES 13: note = MeGly
  SITE 1: note = N-terminal N,N,N-trimethyl-2-(2-(3-carbonylpropoxy)ethoxy)ethan-1-amin ium
  SITE 13: note = C-terminal N,N-dimethylamidyl
XNTWXXXXXXNXX

SEQ ID NO: 240 - protein, 13 aa, synthetic construct
  MOD_RES 1: note = L-penicillamine
  MOD_RES 4: note = 7-methyl-L-tryptophan
  MOD_RES 5: note = N6-acetyl-N6-methyl-L-lysine
  MOD_RES 6: note = L-penicillamine
  MOD_RES 7: note (R)-4-(2-(4-(2-amino-2-carboxyethyl)phenoxy)ethyl)-1,1-dime thylpiperidin-1-ium
  MOD_RES 8: note = 3-(2-naphthyl)-L-alanine
  MOD_RES 9: note = 4-aminotetrahydro-2H-pyran-4-carboxylic acid
  MOD_RES 10: note = N6-acetyl-N6-methyl-L-lysine
  MOD_RES 12: note = 3-(3-Pyridyl)-L-alanine
  MOD_RES 13: note = MeGly
  SITE 1: note = N-terminal N,N,N-trimethyl-2-(2-(3-carbonylpropoxy)ethoxy)ethan-1-amin ium
  SITE 13: note = C-terminal N,N-dimethylamidyl
XNTWXXXXXXNXX

SEQ ID NO: 241 - protein, 13 aa, synthetic construct
  MOD_RES 1: note = L-penicillamine
  MOD_RES 2: note = N4,N4-dimethyl-L-asparagine
  MOD_RES 4: note = 7-methyl-L-tryptophan
  MOD_RES 5: note = N6-acetyl-N6-methyl-L-lysine
  MOD_RES 6: note = L-penicillamine
  MOD_RES 7: note = 4-(2-aminoethoxy)-L-phenylalanine(NMeBismPEG3)
  MOD_RES 8: note = 3-(2-naphthyl)-L-alanine
  MOD_RES 9: note = 4-aminotetrahydro-2H-pyran-4-carboxylic acid
  MOD_RES 10: note = N6-acetyl-N6-methyl-L-lysine
  MOD_RES 12: note = 3-(3-Pyridyl)-L-alanine
  MOD_RES 13: note = MeGly
  SITE 13: note = C-terminal N,N-dimethylamidyl
  SITE 1: note = N-terminal N,N,N-trimethyl-2-(2-(3-carbonylpropoxy)ethoxy)ethan-1-amin ium
XNTWXXXXXXNXX

SEQ ID NO: 242 - protein, 13 aa, synthetic construct
  MOD_RES 1: note = L-penicillamine
  MOD_RES 2: note = N4,N4-dimethyl-L-asparagine
  MOD_RES 4: note = 7-methyl-L-tryptophan
  MOD_RES 5: note = N6-acetyl-N6-methyl-L-lysine
  MOD_RES 6: note = L-penicillamine
  MOD_RES 7: note (S)-2-amino-3-(4-((9-oxo-9-(piperidin-1-yl)nonyl)oxy)phenyl )propanoic acid
  MOD_RES 8: note = 3-(2-naphthyl)-L-alanine
  MOD_RES 9: note = 4-aminotetrahydro-2H-pyran-4-carboxylic acid
  MOD_RES 10: note = N6-acetyl-N6-methyl-L-lysine
  MOD_RES 12: note = 3-(3-Pyridyl)-L-alanine
  MOD_RES 13: note = MeGly
  SITE 13: note = C-terminal N,N-dimethylamidyl
  SITE 1: note = N-terminal N,N,N-trimethyl-2-(2-(3-carbonylpropoxy)ethoxy)ethan-1-amin ium
XNTWXXXXXXNXX

SEQ ID NO: 243 - protein, 13 aa, synthetic construct
  MOD_RES 1: note = L-penicillamine
  MOD_RES 2: note = N4,N4-dimethyl-L-asparagine
  MOD_RES 4: note = 7-methyl-L-tryptophan
  MOD_RES 5: note = N6-acetyl-L-lysine
  MOD_RES 6: note = L-penicillamine
  MOD_RES 7: note (R)-4-(2-(4-(2-amino-2-carboxyethyl)phenoxy)ethyl)-1,1-dime thylpiperidin-1-ium
  MOD_RES 8: note = 3-(2-naphthyl)-L-alanine
  MOD_RES 9: note = 4-aminotetrahydro-2H-pyran-4-carboxylic acid
  MOD_RES 10: note = N6-acetyl-N6-methyl-L-lysine
  MOD_RES 12: note = 3-(3-Pyridyl)-L-alanine
  MOD_RES 13: note = MeGly
  SITE 1: note = N-terminal N,N,N-trimethyl-2-(2-(3-carbonylpropoxy)ethoxy)ethan-1-amin ium
  SITE 13: note = C-terminal N,N-dimethylamidyl
XNTWKXXXXXNXX

SEQ ID NO: 244 - protein, 13 aa, synthetic construct
  MOD_RES 1: note = L-penicillamine
  MOD_RES 2: note = N4,N4-dimethyl-L-asparagine
  MOD_RES 4: note = 7-methyl-L-tryptophan
  MOD_RES 5: note = N6-acetyl-N6-methyl-L-lysine
  MOD_RES 6: note = L-penicillamine
  MOD_RES 7: note (R)-4-(2-(4-(2-amino-2-carboxyethyl)phenoxy)ethyl)-1,1-dime thylpiperidin-1-ium
  MOD_RES 8: note = 3-(2-naphthyl)-L-alanine
  MOD_RES 9: note = 4-aminotetrahydro-2H-pyran-4-carboxylic acid
  MOD_RES 10: note (R)-2-(2-(2-amino-2-carboxyethoxy)ethoxy)-N,N,N-trimethylet han-1-aminium(S)
  MOD_RES 12: note = 3-(3-Pyridyl)-L-alanine
  MOD_RES 13: note = MeGly
  SITE 13: note = C-terminal N,N-dimethylamidyl
  SITE 1: note = N-terminal acetyl
XNTWXXXXXXNXX

SEQ ID NO: 245 - protein, 13 aa, synthetic construct
  MOD_RES 1: note = L-penicillamine
  MOD_RES 2: note = N4,N4-dimethyl-L-asparagine
  MOD_RES 4: note = 7-methyl-L-tryptophan
  MOD_RES 5: note (R)-2-(2-(2-amino-2-carboxyethoxy)ethoxy)-N,N,N-trimethylet han-1-aminium(S)
  MOD_RES 6: note = L-penicillamine
  MOD_RES 7: note = 4-(2-aminoethoxy)-L-phenylalanine
  MOD_RES 8: note = 3-(2-naphthyl)-L-alanine
  MOD_RES 9: note = 4-aminotetrahydro-2H-pyran-4-carboxylic acid
  MOD_RES 10: note = N6-acetyl-N6-methyl-L-lysine
  MOD_RES 12: note = 3-(3-Pyridyl)-L-alanine
  MOD_RES 13: note = MeGly
  SITE 13: note = C-terminal N,N-dimethylamidyl
  SITE 1: note = N-terminal N,N,N-trimethyl-2-(2-(3-carbonylpropoxy)ethoxy)ethan-1-amin ium
XNTWXXXXXXNXX

SEQ ID NO: 246 - protein, 13 aa, synthetic construct
  MOD_RES 1: note = L-penicillamine
  MOD_RES 2: note = N4,N4-dimethyl-L-asparagine
  MOD_RES 4: note = 7-methyl-L-tryptophan
  MOD_RES 5: note (R)-2-(2-(2-amino-2-carboxyethoxy)ethoxy)-N,N,N-trimethylet han-1-aminium(R)
  MOD_RES 6: note = L-penicillamine
  MOD_RES 7: note = 4-(2-aminoethoxy)-L-phenylalanine
  MOD_RES 8: note = 3-(2-naphthyl)-L-alanine
  MOD_RES 9: note = 4-aminotetrahydro-2H-pyran-4-carboxylic acid
  MOD_RES 10: note = N6-acetyl-N6-methyl-L-lysine
  MOD_RES 12: note = 3-(3-Pyridyl)-L-alanine
  MOD_RES 13: note = MeGly
  SITE 13: note = C-terminal N,N-dimethylamidyl
  SITE 1: note = N-terminal N,N,N-trimethyl-2-(2-(3-carbonylpropoxy)ethoxy)ethan-1-amin ium
XNTWXXXXXXNXX

SEQ ID NO: 247 - protein, 13 aa, synthetic construct
  MOD_RES 1: note = L-penicillamine
  MOD_RES 2: note = N4,N4-dimethyl-L-asparagine
  MOD_RES 4: note = 7-methyl-L-tryptophan
  MOD_RES 5: note (R)-2-(2-(2-amino-2-carboxyethoxy)ethoxy)-N,N,N-trimethylet han-1-aminium(S)
  MOD_RES 6: note = L-penicillamine
  MOD_RES 7: note (S)-5-(4-(2-amino-2-carboxyethyl)phenoxy)-N,N,N-trimethylpe ntan-1-aminium
  MOD_RES 8: note = 3-(2-naphthyl)-L-alanine
  MOD_RES 9: note = 4-aminotetrahydro-2H-pyran-4-carboxylic acid
  MOD_RES 10: note = N6-acetyl-N6-methyl-L-lysine
  MOD_RES 12: note = 3-(3-Pyridyl)-L-alanine
  MOD_RES 13: note = MeGly
  SITE 1: note = N-terminal N,N,N-trimethyl-2-(2-(3-carbonylpropoxy)ethoxy)ethan-1-amin ium
  SITE 13: note = C-terminal N,N-dimethylamidyl
XNTWXXXXXXNXX

SEQ ID NO: 248 - protein, 13 aa, synthetic construct
  MOD_RES 1: note = L-penicillamine
  MOD_RES 2: note = N4,N4-dimethyl-L-asparagine
  MOD_RES 4: note = 7-methyl-L-tryptophan
  MOD_RES 5: note (R)-2-(2-(2-amino-2-carboxyethoxy)ethoxy)-N,N,N-trimethylet han-1-aminium(R)
  MOD_RES 6: note = L-penicillamine
  MOD_RES 7: note (S)-5-(4-(2-amino-2-carboxyethyl)phenoxy)-N,N,N-trimethylpe ntan-1-aminium
  MOD_RES 8: note = 3-(2-naphthyl)-L-alanine
  MOD_RES 9: note = 4-aminotetrahydro-2H-pyran-4-carboxylic acid
  MOD_RES 10: note = N6-acetyl-N6-methyl-L-lysine
  MOD_RES 12: note = 3-(3-Pyridyl)-L-alanine
  MOD_RES 13: note = MeGly
  SITE 1: note = N-terminal N,N,N-trimethyl-2-(2-(3-carbonylpropoxy)ethoxy)ethan-1-amin ium
  SITE 13: note = C-terminal N,N-dimethylamidyl
XNTWXXXXXXNXX

SEQ ID NO: 249 - protein, 13 aa, synthetic construct
  MOD_RES 1: note = L-penicillamine
  MOD_RES 4: note = 7-methyl-L-tryptophan
  MOD_RES 5: note = N6-acetyl-L-lysine
  MOD_RES 6: note = L-penicillamine
  MOD_RES 7: note (S)-2-(1-(2-(4-(2-amino-2-carboxyethyl)phenoxy)ethyl)-1H-1, 2,3-triazol-4-yl)-N-(2-methoxyethyl)-N,N-dimethylethan-1-am inium
  MOD_RES 8: note = 3-(2-naphthyl)-L-alanine
  MOD_RES 9: note = 4-aminotetrahydro-2H-pyran-4-carboxylic acid
  MOD_RES 10: note = N6-acetyl-L-lysine
  MOD_RES 12: note = 3-(3-Pyridyl)-L-alanine
  MOD_RES 13: note = MeGly
  SITE 13: note = C-terminal amidyl
  SITE 1: note = N-terminal acetyl
XNTWKXXXXKNXX

SEQ ID NO: 250 - protein, 13 aa, synthetic construct
  MOD_RES 1: note = L-penicillamine
  MOD_RES 4: note = 7-methyl-L-tryptophan
  MOD_RES 5: note = N6-acetyl-L-lysine
  MOD_RES 6: note = L-penicillamine
  MOD_RES 7: note (S)-N-(2-(1-(2-(4-(2-amino-2-carboxyethyl)phenoxy)ethyl)-1H -1,2,3-triazol-4-yl)ethyl)-N,N-dimethyloctan-1-aminium
  MOD_RES 8: note = 3-(2-naphthyl)-L-alanine
  MOD_RES 9: note = 4-aminotetrahydro-2H-pyran-4-carboxylic acid
  MOD_RES 10: note = N6-acetyl-L-lysine
  MOD_RES 12: note = 3-(3-Pyridyl)-L-alanine
  MOD_RES 13: note = MeGly
  SITE 13: note = C-terminal amidyl
  SITE 1: note = N-terminal acetyl
XNTWKXXXXKNXX

SEQ ID NO: 251 - protein, 13 aa, synthetic construct
  MOD_RES 1: note = L-penicillamine
  MOD_RES 4: note = 7-methyl-L-tryptophan
  MOD_RES 5: note = N6-acetyl-L-lysine
  MOD_RES 6: note = L-penicillamine
  MOD_RES 7: note (S)-2-(2-(2-(2-(1-(2-(4-(2-amino-2-carboxyethyl)phenoxy)eth yl)-1H-1,2,3-triazol-4-yl)ethoxy)ethoxy)ethoxy)-N,N,N-trime thylethan
  MOD_RES 8: note = 3-(2-naphthyl)-L-alanine
  MOD_RES 9: note = 4-aminotetrahydro-2H-pyran-4-carboxylic acid
  MOD_RES 10: note = N6-acetyl-L-lysine
  MOD_RES 12: note = 3-(3-Pyridyl)-L-alanine
  MOD_RES 13: note = MeGly
  SITE 13: note = C-terminal amidyl
  SITE 1: note = N-terminal acetyl
XNTWKXXXXKNXX

SEQ ID NO: 252 - protein, 13 aa, synthetic construct
  MOD_RES 1: note = L-penicillamine
  MOD_RES 4: note = 7-methyl-L-tryptophan
  MOD_RES 5: note = N6-acetyl-L-lysine
  MOD_RES 6: note = L-penicillamine
  MOD_RES 7: note (S)-1-(1-(2-(4-(2-amino-2-carboxyethyl)phenoxy)ethyl)-1H-1, 2,3-triazol-4-yl)-N,N,N-trimethyl-2,5,8,11-tetraoxatridecan -13-amini
  MOD_RES 8: note = 3-(2-naphthyl)-L-alanine
  MOD_RES 9: note = 4-aminotetrahydro-2H-pyran-4-carboxylic acid
  MOD_RES 10: note = N6-acetyl-L-lysine
  MOD_RES 12: note = 3-(3-Pyridyl)-L-alanine
  MOD_RES 13: note = MeGly
  SITE 1: note = N-terminal acetyl
  SITE 13: note = C-terminal amidyl
XNTWKXXXXKNXX

SEQ ID NO: 253 - protein, 13 aa, synthetic construct
  MOD_RES 1: note = L-penicillamine
  MOD_RES 4: note = 7-methyl-L-tryptophan
  MOD_RES 5: note = N6-acetyl-L-lysine
  MOD_RES 6: note = L-penicillamine
  MOD_RES 7: note (S)-2-(1-(2-amino-2-carboxyethyl)-1H-1,2,3-triazol-4-yl)-N, N,N-trimethylethan-1-aminium
  MOD_RES 8: note = 3-(2-naphthyl)-L-alanine
  MOD_RES 9: note = 4-aminotetrahydro-2H-pyran-4-carboxylic acid
  MOD_RES 10: note = N6-acetyl-L-lysine
  MOD_RES 12: note = 3-(3-Pyridyl)-L-alanine
  MOD_RES 13: note = MeGly
  SITE 1: note = N-terminal acetyl
  SITE 13: note = C-terminal amidyl
XNTWKXXXXKNXX

SEQ ID NO: 254 - protein, 13 aa, synthetic construct
  MOD_RES 1: note = L-penicillamine
  MOD_RES 2: note = N4,N4-dimethyl-L-asparagine
  MOD_RES 4: note = 7-methyl-L-tryptophan
  MOD_RES 5: note = N6-acetyl-N6-methyl-L-lysine
  MOD_RES 6: note = L-penicillamine
  MOD_RES 7: note (S)-2-(2-(2-(9-(4-(2-amino-2-carboxyethyl)phenoxy)nonanamid o)ethoxy)ethoxy)-N,N,N-trimethylethan-1-aminium
  MOD_RES 8: note = 3-(2-naphthyl)-L-alanine
  MOD_RES 9: note = 4-aminotetrahydro-2H-pyran-4-carboxylic acid
  MOD_RES 10: note = N6-acetyl-N6-methyl-L-lysine
  MOD_RES 12: note = 3-(3-Pyridyl)-L-alanine
  MOD_RES 13: note = MeGly
  SITE 13: note = C-terminal N,N-dimethylamidyl
  SITE 1: note = N-terminal N,N,N-trimethyl-2-(2-(3-carbonylpropoxy)ethoxy)ethan-1-amin ium
XNTWXXXXXXNXX

SEQ ID NO: 255 - protein, 13 aa, synthetic construct
  MOD_RES 1: note = L-penicillamine
  MOD_RES 2: note = N4,N4-dimethyl-L-asparagine
  MOD_RES 4: note = 7-methyl-L-tryptophan
  MOD_RES 5: note (R)-2-(2-(2-amino-2-carboxyethoxy)ethoxy)-N,N,N-trimethylet han-1-aminium(R)
  MOD_RES 6: note = L-penicillamine
  MOD_RES 7: note (R)-4-(2-(4-(2-amino-2-carboxyethyl)phenoxy)ethyl)-1,1-dime thylpiperidin-1-ium
  MOD_RES 8: note = 3-(2-naphthyl)-L-alanine
  MOD_RES 9: note = 4-aminotetrahydro-2H-pyran-4-carboxylic acid
  MOD_RES 10: note (R)-2-(2-(2-amino-2-carboxyethoxy)ethoxy)-N,N,N-trimethylet han-1-aminium(S)
  MOD_RES 12: note = 3-(3-Pyridyl)-L-alanine
  MOD_RES 13: note = MeGly
  SITE 13: note = C-terminal N,N-dimethylamidyl
  SITE 1: note = N-terminal acetyl
XNTWXXXXXXNXX

SEQ ID NO: 256 - protein, 13 aa, synthetic construct
  MOD_RES 1: note = L-penicillamine
  MOD_RES 2: note = N4,N4-dimethyl-L-asparagine
  MOD_RES 4: note = 7-methyl-L-tryptophan
  MOD_RES 5: note (R)-2-(2-(2-amino-2-carboxyethoxy)ethoxy)-N,N,N-trimethylet han-1-aminium(S)
  MOD_RES 6: note = L-penicillamine
  MOD_RES 7: note (R)-4-(2-(4-(2-amino-2-carboxyethyl)phenoxy)ethyl)-1,1-dime thylpiperidin-1-ium
  MOD_RES 8: note = 3-(2-naphthyl)-L-alanine
  MOD_RES 9: note = 4-aminotetrahydro-2H-pyran-4-carboxylic acid
  MOD_RES 10: note (R)-2-(2-(2-amino-2-carboxyethoxy)ethoxy)-N,N,N-trimethylet han-1-aminium(S)
  MOD_RES 12: note = 3-(3-Pyridyl)-L-alanine
  MOD_RES 13: note = MeGly
  SITE 13: note = C-terminal N,N-dimethylamidyl
  SITE 1: note = N-terminal acetyl
XNTWXXXXXXNXX

SEQ ID NO: 257 - protein, 13 aa, synthetic construct
  MOD_RES 1: note = L-penicillamine
  MOD_RES 2: note = N4,N4-dimethyl-L-asparagine
  MOD_RES 4: note = 7-methyl-L-tryptophan
  MOD_RES 5: note (R)-2-(4-(((S)-3-amino-3-carboxypropyl)(methyl)amino)-4-oxo butanamido)-3-carboxy-N,N,N-trimethylpropan-1-aminium
  MOD_RES 6: note = L-penicillamine
  MOD_RES 7: note (R)-4-(2-(4-(2-amino-2-carboxyethyl)phenoxy)ethyl)-1,1-dime thylpiperidin-1-ium
  MOD_RES 8: note = 3-(2-naphthyl)-L-alanine
  MOD_RES 9: note = 4-aminotetrahydro-2H-pyran-4-carboxylic acid
  MOD_RES 10: note = (S)-2-amino-4-(N-methylacetamido)butanoic acid
  MOD_RES 12: note = 3-(3-Pyridyl)-L-alanine
  MOD_RES 13: note = MeGly
  SITE 13: note = C-terminal N,N-dimethylamidyl
  SITE 1: note = N-terminal acetyl
XNTWXXXXXXNXX

SEQ ID NO: 258 - protein, 13 aa, synthetic construct
  MOD_RES 1: note = L-penicillamine
  MOD_RES 4: note = 7-methyl-L-tryptophan
  MOD_RES 5: note = N6-acetyl-L-lysine
  MOD_RES 6: note = L-penicillamine
  MOD_RES 7: note (S)-4-(1-(2-(4-(2-amino-2-carboxyethyl)phenoxy)ethyl)-1H-1, 2,3-triazol-4-yl)-N,N,N-trimethylbutan-1-aminium
  MOD_RES 8: note = 3-(2-naphthyl)-L-alanine
  MOD_RES 9: note = 4-aminotetrahydro-2H-pyran-4-carboxylic acid
  MOD_RES 10: note = N6-acetyl-L-lysine
  MOD_RES 12: note = 3-(3-Pyridyl)-L-alanine
  MOD_RES 13: note = MeGly
  SITE 1: note = N-terminal acetyl
  SITE 13: note = C-terminal amidyl
XNTWKXXXXKNXX

SEQ ID NO: 259 - protein, 13 aa, synthetic construct
  MOD_RES 1: note = L-penicillamine
  MOD_RES 4: note = 7-methyl-L-tryptophan
  MOD_RES 5: note = N6-acetyl-L-lysine
  MOD_RES 6: note = L-penicillamine
  MOD_RES 7: note (S)-N-(2-(1-(2-(4-(2-amino-2-carboxyethyl)phenoxy)ethyl)-1H -1,2,3-triazol-4-yl)ethyl)-N,N-dimethylhexadecan-1-aminium
  MOD_RES 8: note = 3-(2-naphthyl)-L-alanine
  MOD_RES 9: note = 4-aminotetrahydro-2H-pyran-4-carboxylic acid
  MOD_RES 10: note = N6-acetyl-L-lysine
  MOD_RES 12: note = 3-(3-Pyridyl)-L-alanine
  MOD_RES 13: note = MeGly
  SITE 13: note = C-terminal amidyl
  SITE 1: note = N-terminal acetyl
XNTWKXXXXKNXX

SEQ ID NO: 260 - protein, 13 aa, synthetic construct
  MOD_RES 1: note = L-penicillamine
  MOD_RES 4: note = 7-methyl-L-tryptophan
  MOD_RES 5: note = N6-acetyl-L-lysine
  MOD_RES 6: note = L-penicillamine
  MOD_RES 7: note (S)-2-(1-(2-(4-(2-amino-2-carboxyethyl)phenoxy)ethyl)-1H-1, 2,3-triazol-4-yl)-N-(2-(2-(2-methoxyethoxy)ethoxy)ethyl)-N, N-dimethy
  MOD_RES 8: note = 3-(2-naphthyl)-L-alanine
  MOD_RES 9: note = 4-aminotetrahydro-2H-pyran-4-carboxylic acid
  MOD_RES 10: note = N6-acetyl-L-lysine
  MOD_RES 12: note = 3-(3-Pyridyl)-L-alanine
  MOD_RES 13: note = MeGly
  SITE 13: note = C-terminal amidyl
  SITE 1: note = N-terminal acetyl
XNTWKXXXXKNXX

SEQ ID NO: 261 - protein, 13 aa, synthetic construct
  MOD_RES 1: note = L-penicillamine
  MOD_RES 2: note = N4,N4-dimethyl-L-asparagine
  MOD_RES 4: note = 7-methyl-L-tryptophan
  MOD_RES 5: note = N6-acetyl-N6-methyl-L-lysine
  MOD_RES 6: note = L-penicillamine
  MOD_RES 7: note = 4-(2-aminoethoxy)-L-phenylalanine(NMe3)
  MOD_RES 8: note = 3-(2-naphthyl)-L-alanine
  MOD_RES 9: note = 4-aminotetrahydro-2H-pyran-4-carboxylic acid
  MOD_RES 10: note = N6-acetyl-N6-methyl-L-lysine
  MOD_RES 12: note = 3-(3-Pyridyl)-L-alanine
  MOD_RES 13: note = MeGly
  SITE 13: note = C-terminal N,N-dimethylamidyl
  SITE 1: note = N-terminal N,N,N-trimethyl-2-(2-(3-carbonylpropoxy)ethoxy)ethan-1-amin ium
XNTWXXXXXXNXX

SEQ ID NO: 262 - protein, 13 aa, synthetic construct
  MOD_RES 1: note = L-penicillamine
  MOD_RES 2: note = N4,N4-dimethyl-L-asparagine
  MOD_RES 4: note = 7-methyl-L-tryptophan
  MOD_RES 5: note = N6-acetyl-N6-methyl-L-lysine
  MOD_RES 6: note = L-penicillamine
  MOD_RES 7: note (S)-3-(2-(4-(2-amino-2-carboxyethyl)phenoxy)ethyl)-9-(2-met hoxyethyl)-3,6,9-triazaspiro[5.5]undecan-6-ium
  MOD_RES 8: note = 3-(2-naphthyl)-L-alanine
  MOD_RES 9: note = 4-aminotetrahydro-2H-pyran-4-carboxylic acid
  MOD_RES 10: note = N6-acetyl-N6-methyl-L-lysine
  MOD_RES 12: note = 3-(3-Pyridyl)-L-alanine
  MOD_RES 13: note = MeGly
  SITE 1: note = N-terminal N,N,N-trimethyl-2-(2-(3-carbonylpropoxy)ethoxy)ethan-1-amin ium
  SITE 13: note = C-terminal N,N-dimethylamidyl
XNTWXXXXXXNXX

SEQ ID NO: 263 - protein, 13 aa, synthetic construct
  MOD_RES 1: note = L-penicillamine
  MOD_RES 2: note = N4,N4-dimethyl-L-asparagine
  MOD_RES 4: note = 7-methyl-L-tryptophan
  MOD_RES 5: note = N6-acetyl-N6-methyl-L-lysine
  MOD_RES 6: note = L-penicillamine
  MOD_RES 7: note (S)-N-(2-(2-(2-(4-(2-amino-2-carboxyethyl)phenoxy)ethoxy)et hoxy)ethyl)-N,N-dibutylbutan-1-aminium
  MOD_RES 8: note = 3-(2-naphthyl)-L-alanine
  MOD_RES 9: note = 4-aminotetrahydro-2H-pyran-4-carboxylic acid
  MOD_RES 10: note = N6-acetyl-N6-methyl-L-lysine
  MOD_RES 12: note = 3-(3-Pyridyl)-L-alanine
  MOD_RES 13: note = MeGly
  SITE 1: note = N-terminal N,N,N-trimethyl-2-(2-(3-carbonylpropoxy)ethoxy)ethan-1-amin ium
  SITE 13: note = C-terminal N,N-dimethylamidyl
XNTWXXXXXXNXX

SEQ ID NO: 264 - protein, 13 aa, synthetic construct
  MOD_RES 1: note = L-penicillamine
  MOD_RES 2: note = N4,N4-dimethyl-L-asparagine
  MOD_RES 4: note = 7-methyl-L-tryptophan
  MOD_RES 5: note = N6-acetyl-N6-methyl-L-lysine
  MOD_RES 6: note = L-penicillamine
  MOD_RES 7: note = 4-(2-aminoethoxy)-L-phenylalanine(aPEG2a)
  MOD_RES 8: note = 3-(2-naphthyl)-L-alanine
  MOD_RES 9: note = 4-aminotetrahydro-2H-pyran-4-carboxylic acid
  MOD_RES 10: note = N6-acetyl-N6-methyl-L-lysine
  MOD_RES 12: note = 3-(3-Pyridyl)-L-alanine
  MOD_RES 13: note = MeGly
  SITE 13: note = C-terminal N,N-dimethylamidyl
  SITE 1: note = N-terminal N,N,N-trimethyl-2-(2-(3-carbonylpropoxy)ethoxy)ethan-1-amin ium
XNTWXXXXXXNXX

SEQ ID NO: 265 - protein, 13 aa, synthetic construct
  MOD_RES 1: note = L-penicillamine
  MOD_RES 2: note = N4,N4-dimethyl-L-asparagine
  MOD_RES 4: note = 7-methyl-L-tryptophan
  MOD_RES 5: note = N6-acetyl-N6-methyl-L-lysine
  MOD_RES 6: note = L-penicillamine
  MOD_RES 7: note = 4-(2-aminoethoxy)-L-phenylalanine(BisPEG2a)(RS)
  MOD_RES 8: note = 3-(2-naphthyl)-L-alanine
  MOD_RES 9: note = 4-aminotetrahydro-2H-pyran-4-carboxylic acid
  MOD_RES 10: note = N6-acetyl-N6-methyl-L-lysine
  MOD_RES 12: note = 3-(3-Pyridyl)-L-alanine
  MOD_RES 13: note = MeGly
  SITE 1: note = N-terminal N,N,N-trimethyl-2-(2-(3-carbonylpropoxy)ethoxy)ethan-1-amin ium
  SITE 13: note = C-terminal N,N-dimethylamidyl
XNTWXXXXXXNXX

SEQ ID NO: 266 - protein, 13 aa, synthetic construct
  MOD_RES 1: note = L-penicillamine
  MOD_RES 2: note = N4,N4-dimethyl-L-asparagine
  MOD_RES 4: note = 7-methyl-L-tryptophan
  MOD_RES 5: note = N6-acetyl-N6-methyl-L-lysine
  MOD_RES 6: note = L-penicillamine
  MOD_RES 7: note = 4-(2-aminoethoxy)-L-phenylalanine(BisPEG2a)(S)
  MOD_RES 8: note = 3-(2-naphthyl)-L-alanine
  MOD_RES 9: note = 4-aminotetrahydro-2H-pyran-4-carboxylic acid
  MOD_RES 10: note = N6-acetyl-N6-methyl-L-lysine
  MOD_RES 12: note = 3-(3-Pyridyl)-L-alanine
  MOD_RES 13: note = MeGly
  SITE 1: note = N-terminal N,N,N-trimethyl-2-(2-(3-carbonylpropoxy)ethoxy)ethan-1-amin ium
  SITE 13: note = C-terminal N,N-dimethylamidyl
XNTWXXXXXXNXX

SEQ ID NO: 267 - protein, 13 aa, synthetic construct
  MOD_RES 1: note = L-penicillamine
  MOD_RES 2: note = N4,N4-dimethyl-L-asparagine
  MOD_RES 4: note = 7-methyl-L-tryptophan
  MOD_RES 5: note (R)-2-(2-(2-amino-2-carboxyethoxy)ethoxy)-N,N,N-trimethylet han-1-aminium(S)
  MOD_RES 6: note = L-penicillamine
  MOD_RES 7: note (R)-4-(2-(4-(2-amino-2-carboxyethyl)phenoxy)ethyl)-1,1-dime thylpiperidin-1-ium
  MOD_RES 8: note = 3-(2-naphthyl)-L-alanine
  MOD_RES 9: note = 4-aminotetrahydro-2H-pyran-4-carboxylic acid
  MOD_RES 10: note = N6-acetyl-N6-methyl-L-lysine
  MOD_RES 12: note = 3-(3-Pyridyl)-L-alanine
  MOD_RES 13: note = MeGly
  SITE 13: note = C-terminal N,N-dimethylamidyl
  SITE 1: note = N-terminal acetyl
XNTWXXXXXXNXX

SEQ ID NO: 268 - protein, 13 aa, synthetic construct
  MOD_RES 1: note = L-penicillamine
  MOD_RES 2: note = N4,N4-dimethyl-L-asparagine
  MOD_RES 4: note = 7-methyl-L-tryptophan
  MOD_RES 5: note (R)-2-(2-(2-amino-2-carboxyethoxy)ethoxy)-N,N,N-trimethylet han-1-aminium(R)
  MOD_RES 6: note = L-penicillamine
  MOD_RES 7: note (R)-4-(2-(4-(2-amino-2-carboxyethyl)phenoxy)ethyl)-1,1-dime thylpiperidin-1-ium
  MOD_RES 8: note = 3-(2-naphthyl)-L-alanine
  MOD_RES 9: note = 4-aminotetrahydro-2H-pyran-4-carboxylic acid
  MOD_RES 10: note = N6-acetyl-N6-methyl-L-lysine
  MOD_RES 12: note = 3-(3-Pyridyl)-L-alanine
  MOD_RES 13: note = MeGly
  SITE 1: note = N-terminal acetyl
  SITE 13: note = C-terminal N,N-dimethylamidyl
XNTWXXXXXXNXX

SEQ ID NO: 269 - protein, 13 aa, synthetic construct
  MOD_RES 1: note = L-penicillamine
  MOD_RES 2: note = N4,N4-dimethyl-L-asparagine
  MOD_RES 4: note = 7-methyl-L-tryptophan
  MOD_RES 5: note = N6-acetyl-N6-methyl-L-lysine
  MOD_RES 6: note = L-penicillamine
  MOD_RES 7: note (S)-9-(2-(4-(2-amino-2-carboxyethyl)phenoxy)ethyl)-3,3-dime thyl-3,6,9-triazaspiro[5.5]undecane-3,6-diium
  MOD_RES 8: note = 3-(2-naphthyl)-L-alanine
  MOD_RES 9: note = 4-aminotetrahydro-2H-pyran-4-carboxylic acid
  MOD_RES 10: note = N6-acetyl-N6-methyl-L-lysine
  MOD_RES 12: note = 3-(3-Pyridyl)-L-alanine
  MOD_RES 13: note = MeGly
  SITE 13: note = C-terminal N,N-dimethylamidyl
  SITE 1: note = N-terminal N,N,N-trimethyl-2-(2-(3-carbonylpropoxy)ethoxy)ethan-1-amin ium
XNTWXXXXXXNXX

SEQ ID NO: 270 - protein, 13 aa, synthetic construct
  MOD_RES 1: note = L-penicillamine
  MOD_RES 4: note = 7-methyl-L-tryptophan
  MOD_RES 5: note = N6-acetyl-L-lysine
  MOD_RES 6: note = L-penicillamine
  MOD_RES 7: note (R)-4-(4-(2-amino-2-carboxyethyl)phenyl)-N,N,N-trimethylbut -3-yn-1-aminium
  MOD_RES 8: note = 3-(2-naphthyl)-L-alanine
  MOD_RES 9: note = 4-aminotetrahydro-2H-pyran-4-carboxylic acid
  MOD_RES 10: note = N6-acetyl-L-lysine
  MOD_RES 12: note = 3-(3-Pyridyl)-L-alanine
  MOD_RES 13: note = MeGly
  SITE 13: note = C-terminal amidyl
  SITE 1: note = N-terminal acetyl
XNTWKXXXXKNXX

SEQ ID NO: 271 - protein, 13 aa, synthetic construct
  MOD_RES 1: note = L-penicillamine
  MOD_RES 2: note = N4,N4-dimethyl-L-asparagine
  MOD_RES 4: note = 7-methyl-L-tryptophan
  MOD_RES 5: note = N6-acetyl-N6-methyl-L-lysine
  MOD_RES 6: note = L-penicillamine
  MOD_RES 7: note (S)-4-(2-((4-(4-(2-amino-2-carboxyethyl)phenoxy)butyl)dimet hylammonio)ethyl)-4-methylmorpholin-4-ium
  MOD_RES 8: note = 3-(2-naphthyl)-L-alanine
  MOD_RES 9: note = 4-aminotetrahydro-2H-pyran-4-carboxylic acid
  MOD_RES 10: note = N6-acetyl-N6-methyl-L-lysine
  MOD_RES 12: note = 3-(3-Pyridyl)-L-alanine
  MOD_RES 13: note = MeGly
  SITE 13: note = C-terminal N,N-dimethylamidyl
  SITE 1: note = N-terminal N,N,N-trimethyl-2-(2-(3-carbonylpropoxy)ethoxy)ethan-1-amin ium
XNTWXXXXXXNXX

SEQ ID NO: 272 - protein, 13 aa, synthetic construct
  MOD_RES 1: note = L-penicillamine
  MOD_RES 2: note = N4,N4-dimethyl-L-asparagine
  MOD_RES 4: note = 7-methyl-L-tryptophan
  MOD_RES 5: note = N6-acetyl-N6-methyl-L-lysine
  MOD_RES 6: note = L-penicillamine
  MOD_RES 7: note (S)-4-(4-(2-amino-2-carboxyethyl)phenoxy)-N-(2-(2-methoxyet hoxy)ethyl)-N,N-dimethylbutan-1-aminium
  MOD_RES 8: note = 3-(2-naphthyl)-L-alanine
  MOD_RES 9: note = 4-aminotetrahydro-2H-pyran-4-carboxylic acid
  MOD_RES 10: note = N6-acetyl-N6-methyl-L-lysine
  MOD_RES 12: note = 3-(3-Pyridyl)-L-alanine
  MOD_RES 13: note = MeGly
  SITE 1: note = N-terminal N,N,N-trimethyl-2-(2-(3-carbonylpropoxy)ethoxy)ethan-1-amin ium
  SITE 13: note = C-terminal N,N-dimethylamidyl
XNTWXXXXXXNXX

SEQ ID NO: 273 - protein, 13 aa, synthetic construct
  MOD_RES 1: note = L-penicillamine
  MOD_RES 2: note = N4,N4-dimethyl-L-asparagine
  MOD_RES 4: note = 7-methyl-L-tryptophan
  MOD_RES 5: note = N6-acetyl-N6-methyl-L-lysine
  MOD_RES 6: note = L-penicillamine
  MOD_RES 7: note (S)-4-(4-(2-amino-2-carboxyethyl)phenyl)-1,1-dimethylpipera zin-1-ium
  MOD_RES 8: note = 3-(2-naphthyl)-L-alanine
  MOD_RES 9: note = 4-aminotetrahydro-2H-pyran-4-carboxylic acid
  MOD_RES 10: note = N6-acetyl-N6-methyl-L-lysine
  MOD_RES 12: note = 3-(3-Pyridyl)-L-alanine
  MOD_RES 13: note = MeGly
  SITE 1: note = N-terminal N,N,N-trimethyl-2-(2-(3-carbonylpropoxy)ethoxy)ethan-1-amin ium
  SITE 13: note = C-terminal N,N-dimethylamidyl
XNTWXXXXXXNXX

SEQ ID NO: 274 - protein, 13 aa, synthetic construct
  MOD_RES 1: note = L-penicillamine
  MOD_RES 2: note = N4,N4-dimethyl-L-asparagine
  MOD_RES 4: note = 7-methyl-L-tryptophan
  MOD_RES 5: note = N6-acetyl-N6-methyl-L-lysine
  MOD_RES 6: note = L-penicillamine
  MOD_RES 7: note (S)-4-(3-(4-(2-amino-2-carboxyethyl)phenoxy)propyl)-4-methy lmorpholin-4-ium
  MOD_RES 8: note = 3-(2-naphthyl)-L-alanine
  MOD_RES 9: note = 4-aminotetrahydro-2H-pyran-4-carboxylic acid
  MOD_RES 10: note = N6-acetyl-N6-methyl-L-lysine
  MOD_RES 12: note = 3-(3-Pyridyl)-L-alanine
  MOD_RES 13: note = MeGly
  SITE 1: note = N-terminal N,N,N-trimethyl-2-(2-(3-carbonylpropoxy)ethoxy)ethan-1-amin ium
  SITE 13: note = C-terminal N,N-dimethylamidyl
XNTWXXXXXXNXX

SEQ ID NO: 275 - protein, 13 aa, synthetic construct
  MOD_RES 1: note = L-penicillamine
  MOD_RES 2: note = N4,N4-dimethyl-L-asparagine
  MOD_RES 4: note = 7-methyl-L-tryptophan
  MOD_RES 5: note = N6-acetyl-N6-methyl-L-lysine
  MOD_RES 6: note = L-penicillamine
  MOD_RES 7: note (S)-5-(4-(2-amino-2-carboxyethyl)phenoxy)-N,N,N-trimethylpe ntan-1-aminium
  MOD_RES 8: note = 3-(2-naphthyl)-L-alanine
  MOD_RES 9: note = 4-aminotetrahydro-2H-pyran-4-carboxylic acid
  MOD_RES 10: note (R)-2-(2-(2-amino-2-carboxyethoxy)ethoxy)-N,N,N-trimethylet han-1-aminium
  MOD_RES 12: note = 3-(3-Pyridyl)-L-alanine
  MOD_RES 13: note = MeGly
  SITE 13: note = C-terminal N,N-dimethylamidyl
  SITE 1: note = N-terminal acetyl
XNTWXXXXXXNXX

SEQ ID NO: 276 - protein, 13 aa, synthetic construct
  MOD_RES 1: note = L-penicillamine
  MOD_RES 4: note = 7-methyl-L-tryptophan
  MOD_RES 5: note = N6-acetyl-L-lysine
  MOD_RES 6: note = L-penicillamine
  MOD_RES 7: note = 4-(2-aminoethoxy)-L-phenylalanine
  MOD_RES 8: note = 3-(2-naphthyl)-L-alanine
  MOD_RES 9: note = 4-aminotetrahydro-2H-pyran-4-carboxylic acid
  MOD_RES 12: note = 3-(3-Pyridyl)-L-alanine
  MOD_RES 13: note = MeGly
  SITE 1: note = N-terminal acetyl
  SITE 13: note = C-terminal N,N-dimethylamidyl
XNTWKXXXXENXX

SEQ ID NO: 277 - protein, 13 aa, synthetic construct
  MOD_RES 1: note = L-penicillamine
  MOD_RES 2: note = N4,N4-dimethyl-L-asparagine
  MOD_RES 4: note = 7-methyl-L-tryptophan
  MOD_RES 5: note = N6-acetyl-N6-methyl-L-lysine
  MOD_RES 6: note = L-penicillamine
  MOD_RES 7: note = 4-(2-aminoethoxy)-L-phenylalanine(SPD)
  MOD_RES 8: note = 3-(2-naphthyl)-L-alanine
  MOD_RES 9: note = 4-aminotetrahydro-2H-pyran-4-carboxylic acid
  MOD_RES 10: note = N6-acetyl-N6-methyl-L-lysine
  MOD_RES 12: note = 3-(3-Pyridyl)-L-alanine
  MOD_RES 13: note = MeGly
  SITE 13: note = C-terminal N,N-dimethylamidyl
  SITE 1: note = N-terminal N,N,N-trimethyl-2-(2-(3-carbonylpropoxy)ethoxy)ethan-1-amin ium
XNTWXXXXXXNXX

SEQ ID NO: 278 - protein, 13 aa, synthetic construct
  MOD_RES 1: note = L-penicillamine
  MOD_RES 2: note = N4,N4-dimethyl-L-asparagine
  MOD_RES 4: note = 7-methyl-L-tryptophan
  MOD_RES 5: note (R)-2-(4-(((S)-3-amino-3-carboxypropyl)(methyl)amino)-4-oxo butanamido)-3-carboxy-N,N,N-trimethylpropan-1-aminium
  MOD_RES 6: note = L-penicillamine
  MOD_RES 7: note (R)-4-(2-(4-(2-amino-2-carboxyethyl)phenoxy)ethyl)-1,1-dime thylpiperidin-1-ium
  MOD_RES 8: note = 3-(2-naphthyl)-L-alanine
  MOD_RES 9: note = 4-aminotetrahydro-2H-pyran-4-carboxylic acid
  MOD_RES 10: note (R)-2-(4-(((S)-3-amino-3-carboxypropyl)(methyl)amino)-4-oxo butanamido)-3-carboxy-N,N,N-trimethylpropan-1-aminium
  MOD_RES 12: note = 3-(3-Pyridyl)-L-alanine
  MOD_RES 13: note = MeGly
  SITE 13: note = C-terminal N,N-dimethylamidyl
  SITE 1: note = N-terminal acetyl
XNTWXXXXXXNXX

SEQ ID NO: 279 - protein, 13 aa, synthetic construct
  MOD_RES 1: note = L-penicillamine
  MOD_RES 2: note = N4,N4-dimethyl-L-asparagine
  MOD_RES 4: note = 7-methyl-L-tryptophan
  MOD_RES 5: note = N6-acetyl-L-lysine
  MOD_RES 6: note = L-penicillamine
  MOD_RES 7: note = 4-(2-aminoethoxy)-L-phenylalanine
  MOD_RES 8: note = 3-(2-naphthyl)-L-alanine
  MOD_RES 9: note = 4-aminotetrahydro-2H-pyran-4-carboxylic acid
  MOD_RES 10: note = N6-acetyl-L-lysine
  MOD_RES 12: note = 3-(3-Pyridyl)-L-alanine
  MOD_RES 13: note = MeGly
  SITE 13: note = C-terminal amidyl
  SITE 1: note = N-terminal acetyl
XNTWKXXXXKNXX

SEQ ID NO: 280 - protein, 13 aa, synthetic construct
  MOD_RES 1: note = L-penicillamine
  MOD_RES 4: note = 7-methyl-L-tryptophan
  MOD_RES 5: note = N6-acetyl-N6-methyl-L-lysine
  MOD_RES 6: note = L-penicillamine
  MOD_RES 7: note = 4-(2-aminoethoxy)-L-phenylalanine
  MOD_RES 8: note = 3-(2-naphthyl)-L-alanine
  MOD_RES 9: note = 4-aminotetrahydro-2H-pyran-4-carboxylic acid
  MOD_RES 10: note = N6-acetyl-N6-methyl-L-lysine
  MOD_RES 12: note = 3-(3-Pyridyl)-L-alanine
  MOD_RES 13: note = MeGly
  SITE 13: note = C-terminal amidyl
  SITE 1: note = N-terminal acetyl
XNTWXXXXXXNXX

SEQ ID NO: 281 - protein, 13 aa, synthetic construct
  MOD_RES 1: note = L-penicillamine
  MOD_RES 4: note = 7-methyl-L-tryptophan
  MOD_RES 5: note = N6-acetyl-L-lysine
  MOD_RES 6: note = L-penicillamine
  MOD_RES 7: note (S)-5-(4-(2-amino-2-carboxyethyl)phenoxy)-N,N,N-trimethylpe ntan-1-aminium
  MOD_RES 8: note = 3-(2-naphthyl)-L-alanine
  MOD_RES 9: note = 4-aminotetrahydro-2H-pyran-4-carboxylic acid
  MOD_RES 10: note = N6-acetyl-L-lysine
  MOD_RES 12: note = 3-(3-Pyridyl)-L-alanine
  MOD_RES 13: note = MeGly
  SITE 13: note = C-terminal amidyl
  SITE 1: note = N-terminal acetyl
XNTWKXXXXKNXX

SEQ ID NO: 282 - protein, 13 aa, synthetic construct
  MOD_RES 1: note = L-penicillamine
  MOD_RES 4: note = 7-methyl-L-tryptophan
  MOD_RES 5: note = N6-acetyl-L-lysine
  MOD_RES 6: note = L-penicillamine
  MOD_RES 7: note = 4-(2-aminoethoxy)-L-phenylalanine
  MOD_RES 8: note = 3-(2-naphthyl)-L-alanine
  MOD_RES 9: note = 4-aminotetrahydro-2H-pyran-4-carboxylic acid
  MOD_RES 10: note = N6-acetyl-L-lysine
  MOD_RES 12: note = 3-(3-Pyridyl)-L-alanine
  MOD_RES 13: note = MeGly
  SITE 13: note = C-terminal N,N-dimethylamidyl
  SITE 1: note = N-terminal acetyl
XNTWKXXXXKNXX

SEQ ID NO: 283 - protein, 13 aa, synthetic construct
  MOD_RES 1: note = L-penicillamine
  MOD_RES 2: note = N4,N4-dimethyl-L-asparagine
  MOD_RES 4: note = 7-methyl-L-tryptophan
  MOD_RES 5: note = N6-acetyl-N6-methyl-L-lysine
  MOD_RES 6: note = L-penicillamine
  MOD_RES 7: note (S)-2-(1-(2-(4-(2-amino-2-carboxyethyl)phenoxy)ethyl)-1H-1, 2,3-triazol-4-yl)-N-(2-(2-(2-methoxyethoxy)ethoxy)ethyl)-N, N-dimethy
  MOD_RES 8: note = 3-(2-naphthyl)-L-alanine
  MOD_RES 9: note = 4-aminotetrahydro-2H-pyran-4-carboxylic acid
  MOD_RES 10: note = N6-acetyl-N6-methyl-L-lysine
  MOD_RES 12: note = 3-(3-Pyridyl)-L-alanine
  MOD_RES 13: note = MeGly
  SITE 13: note = C-terminal N,N-dimethylamidyl
  SITE 1: note = N-terminal N,N,N-trimethyl-2-(2-(3-carbonylpropoxy)ethoxy)ethan-1-amin ium
XNTWXXXXXXNXX

SEQ ID NO: 284 - protein, 13 aa, synthetic construct
  MOD_RES 1: note = L-penicillamine
  MOD_RES 2: note = N4,N4-dimethyl-L-asparagine
  MOD_RES 4: note = 7-methyl-L-tryptophan
  MOD_RES 5: note = N6-acetyl-N6-methyl-L-lysine
  MOD_RES 6: note = L-penicillamine
  MOD_RES 7: note (S)-4-(1-(2-(4-(2-amino-2-carboxyethyl)phenoxy)ethyl)-1H-1, 2,3-triazol-4-yl)-N,N,N-trimethylbutan-1-aminium
  MOD_RES 8: note = 3-(2-naphthyl)-L-alanine
  MOD_RES 9: note = 4-aminotetrahydro-2H-pyran-4-carboxylic acid
  MOD_RES 10: note = N6-acetyl-N6-methyl-L-lysine
  MOD_RES 12: note = 3-(3-Pyridyl)-L-alanine
  MOD_RES 13: note = MeGly
  SITE 13: note = C-terminal N,N-dimethylamidyl
  SITE 1: note = N-terminal N,N,N-trimethyl-2-(2-(3-carbonylpropoxy)ethoxy)ethan-1-amin ium
XNTWXXXXXXNXX

SEQ ID NO: 285 - protein, 13 aa, synthetic construct
  MOD_RES 1: note = L-penicillamine
  MOD_RES 2: note = N4,N4-dimethyl-L-asparagine
  MOD_RES 4: note = 7-methyl-L-tryptophan
  MOD_RES 5: note = N6-acetyl-N6-methyl-L-lysine
  MOD_RES 6: note = L-penicillamine
  MOD_RES 7: note (S)-2-(1-(2-(4-(2-amino-2-carboxyethyl)phenoxy)ethyl)-1H-1, 2,3-triazol-4-yl)-N-(2-methoxyethyl)-N,N-dimethylethan-1-am inium
  MOD_RES 8: note = 3-(2-naphthyl)-L-alanine
  MOD_RES 9: note = 4-aminotetrahydro-2H-pyran-4-carboxylic acid
  MOD_RES 10: note = N6-acetyl-N6-methyl-L-lysine
  MOD_RES 12: note = 3-(3-Pyridyl)-L-alanine
  MOD_RES 13: note = MeGly
  SITE 13: note = C-terminal N,N-dimethylamidyl
  SITE 1: note = N-terminal N,N,N-trimethyl-2-(2-(3-carbonylpropoxy)ethoxy)ethan-1-amin ium
XNTWXXXXXXNXX

SEQ ID NO: 286 - protein, 13 aa, synthetic construct
  MOD_RES 1: note = L-penicillamine
  MOD_RES 2: note = N4,N4-dimethyl-L-asparagine
  MOD_RES 4: note = 7-methyl-L-tryptophan
  MOD_RES 5: note = N6-acetyl-N6-methyl-L-lysine
  MOD_RES 6: note = L-penicillamine
  MOD_RES 7: note (S)-2-(1-(2-(4-(2-amino-2-carboxyethyl)phenoxy)ethyl)-1H-1, 2,3-triazol-4-yl)-N,N,N-trimethylethan-1-aminium
  MOD_RES 8: note = 3-(2-naphthyl)-L-alanine
  MOD_RES 9: note = 4-aminotetrahydro-2H-pyran-4-carboxylic acid
  MOD_RES 10: note = N6-acetyl-N6-methyl-L-lysine
  MOD_RES 12: note = 3-(3-Pyridyl)-L-alanine
  MOD_RES 13: note = MeGly
  SITE 13: note = C-terminal N,N-dimethylamidyl
  SITE 1: note = N-terminal N,N,N-trimethyl-2-(2-(3-carbonylpropoxy)ethoxy)ethan-1-amin ium
XNTWXXXXXXNXX

SEQ ID NO: 287 - protein, 13 aa, synthetic construct
  MOD_RES 1: note = L-penicillamine
  MOD_RES 2: note = N4,N4-dimethyl-L-asparagine
  MOD_RES 4: note = 7-methyl-L-tryptophan
  MOD_RES 5: note = N6-acetyl-N6-methyl-L-lysine
  MOD_RES 6: note = L-penicillamine
  MOD_RES 7: note (S)-2-(1-(2-amino-2-carboxyethyl)-1H-1,2,3-triazol-4-yl)-N, N,N-trimethylethan-1-aminium
  MOD_RES 8: note = 3-(2-naphthyl)-L-alanine
  MOD_RES 9: note = 4-aminotetrahydro-2H-pyran-4-carboxylic acid
  MOD_RES 10: note = N6-acetyl-N6-methyl-L-lysine
  MOD_RES 12: note = 3-(3-Pyridyl)-L-alanine
  MOD_RES 13: note = MeGly
  SITE 1: note = N-terminal N,N,N-trimethyl-2-(2-(3-carbonylpropoxy)ethoxy)ethan-1-amin ium
  SITE 13: note = C-terminal N,N-dimethylamidyl
XNTWXXXXXXNXX

SEQ ID NO: 288 - protein, 13 aa, synthetic construct
  SITE 1: note = N-terminal N,N,N-trimethyl-2-(2-(3-carbonylpropoxy)ethoxy)ethan-1-amin ium
  MOD_RES 1: note = L-penicillamine
  MOD_RES 2: note = N4,N4-dimethyl-L-asparagine
  MOD_RES 4: note = 7-methyl-L-tryptophan
  MOD_RES 5: note = N6-acetyl-N6-methyl-L-lysine
  MOD_RES 6: note = L-penicillamine
  MOD_RES 7: note (S)-2-(1-(2-amino-2-carboxyethyl)-1H-1,2,3-triazol-4-yl)-N- (2-(2-(2-methoxyethoxy)ethoxy)ethyl)-N,N-dimethylethan-1-am inium
  MOD_RES 8: note = 3-(2-naphthyl)-L-alanine
  MOD_RES 9: note = 4-aminotetrahydro-2H-pyran-4-carboxylic acid
  MOD_RES 10: note = N6-acetyl-N6-methyl-L-lysine
  MOD_RES 12: note = 3-(3-Pyridyl)-L-alanine
  MOD_RES 13: note = MeGly
  SITE 13: note = C-terminal N,N-dimethylamidyl
XNTWXXXXXXNXX

SEQ ID NO: 289 - protein, 13 aa, synthetic construct
  SITE 1: note = N-terminal N,N,N-trimethyl-2-(2-(3-carbonylpropoxy)ethoxy)ethan-1-amin ium
  MOD_RES 1: note = L-penicillamine
  MOD_RES 2: note = N4,N4-dimethyl-L-asparagine
  MOD_RES 4: note = 7-methyl-L-tryptophan
  MOD_RES 5: note = N6-acetyl-N6-methyl-L-lysine
  MOD_RES 6: note = L-penicillamine
  MOD_RES 7: note (S)-2-(1-(2-amino-2-carboxyethyl)-1H-1,2,3-triazol-4-yl)-N- (2-(2-(2-methoxyethoxy)ethoxy)ethyl)-N,N-dimethylethan-1-am inium
  MOD_RES 8: note = 3-(2-naphthyl)-L-alanine
  MOD_RES 9: note = 4-aminotetrahydro-2H-pyran-4-carboxylic acid
  MOD_RES 10: note = N6-acetyl-N6-methyl-L-lysine
  MOD_RES 12: note = 3-(3-Pyridyl)-L-alanine
  MOD_RES 13: note = MeGly
  SITE 13: note = C-terminal N,N-dimethylamidyl
XNTWXXXXXXNXX

SEQ ID NO: 290 - protein, 13 aa, synthetic construct
  SITE 1: note = N-terminal N,N,N-trimethyl-2-(2-(3-carbonylpropoxy)ethoxy)ethan-1-amin ium
  MOD_RES 1: note = L-penicillamine
  MOD_RES 2: note = N4,N4-dimethyl-L-asparagine
  MOD_RES 4: note = 7-methyl-L-tryptophan
  MOD_RES 5: note = N6-acetyl-N6-methyl-L-lysine
  MOD_RES 6: note = L-penicillamine
  MOD_RES 7: note (S)-N-(2-(1-(2-(4-(2-amino-2-carboxyethyl)phenoxy)ethyl)-1H -1,2,3-triazol-4-yl)ethyl)-N,N-dimethyloctan-1-aminium
  MOD_RES 8: note = 3-(2-naphthyl)-L-alanine
  MOD_RES 9: note = 4-aminotetrahydro-2H-pyran-4-carboxylic acid
  MOD_RES 10: note = N6-acetyl-N6-methyl-L-lysine
  MOD_RES 12: note = 3-(3-Pyridyl)-L-alanine
  MOD_RES 13: note = MeGly
  SITE 13: note = C-terminal N,N-dimethylamidyl
XNTWXXXXXXNXX

SEQ ID NO: 291 - protein, 13 aa, synthetic construct
  SITE 1: note = N-terminal N,N,N-trimethyl-2-(2-(3-carbonylpropoxy)ethoxy)ethan-1-amin ium
  MOD_RES 1: note = L-penicillamine
  MOD_RES 2: note = N4,N4-dimethyl-L-asparagine
  MOD_RES 4: note = 7-methyl-L-tryptophan
  MOD_RES 5: note = N6-acetyl-N6-methyl-L-lysine
  MOD_RES 6: note = L-penicillamine
  MOD_RES 7: note (S)-N-(2-(1-(2-(4-(2-amino-2-carboxyethyl)phenoxy)ethyl)-1H -1,2,3-triazol-4-yl)ethyl)-N,N-dimethylhexadecan-1-aminium
  MOD_RES 8: note = 3-(2-naphthyl)-L-alanine
  MOD_RES 9: note = 4-aminotetrahydro-2H-pyran-4-carboxylic acid
  MOD_RES 10: note = N6-acetyl-N6-methyl-L-lysine
  MOD_RES 12: note = 3-(3-Pyridyl)-L-alanine
  MOD_RES 13: note = MeGly
  SITE 13: note = C-terminal N,N-dimethylamidyl
XNTWXXXXXXNXX

SEQ ID NO: 292 - protein, 13 aa, synthetic construct
  SITE 1: note = N-terminal N,N,N-trimethyl-2-(2-(3-carbonylpropoxy)ethoxy)ethan-1-amin ium
  MOD_RES 1: note = L-penicillamine
  MOD_RES 2: note = N4,N4-dimethyl-L-asparagine
  MOD_RES 4: note = 7-methyl-L-tryptophan
  MOD_RES 5: note = N6-acetyl-N6-methyl-L-lysine
  MOD_RES 6: note = L-penicillamine
  MOD_RES 7: note (S)-1-(6-(4-(2-amino-2-carboxyethyl)phenoxy)hexyl)-1,4-diaz abicyclo[2.2.2]octan-1-ium
  MOD_RES 8: note = 3-(2-naphthyl)-L-alanine
  MOD_RES 9: note = 4-aminotetrahydro-2H-pyran-4-carboxylic acid
  MOD_RES 10: note = N6-acetyl-N6-methyl-L-lysine
  MOD_RES 12: note = 3-(3-Pyridyl)-L-alanine
  MOD_RES 13: note = MeGly
  SITE 13: note = C-terminal N,N-dimethylamidyl
XNTWXXXXXXNXX

SEQ ID NO: 293 - protein, 13 aa, synthetic construct
  SITE 1: note = N-terminal N,N,N-trimethyl-2-(2-(3-carbonylpropoxy)ethoxy)ethan-1-amin ium
  MOD_RES 1: note = L-penicillamine
  MOD_RES 2: note = N4,N4-dimethyl-L-asparagine
  MOD_RES 4: note = 7-methyl-L-tryptophan
  MOD_RES 5: note = N6-acetyl-N6-methyl-L-lysine
  MOD_RES 6: note = L-penicillamine
  MOD_RES 7: note (S)-6-(4-(2-amino-2-carboxyethyl)phenoxy)-N,N,N-trimethylhe xan-1-aminium
  MOD_RES 8: note = 3-(2-naphthyl)-L-alanine
  MOD_RES 9: note = 4-aminotetrahydro-2H-pyran-4-carboxylic acid
  MOD_RES 10: note = N6-acetyl-N6-methyl-L-lysine
  MOD_RES 12: note = 3-(3-Pyridyl)-L-alanine
  MOD_RES 13: note = MeGly
  SITE 13: note = C-terminal N,N-dimethylamidyl
XNTWXXXXXXNXX

SEQ ID NO: 294 - protein, 13 aa, synthetic construct
  SITE 1: note = N-terminal N,N,N-trimethyl-2-(2-(3-carbonylpropoxy)ethoxy)ethan-1-amin ium
  MOD_RES 1: note = L-penicillamine
  MOD_RES 2: note = N4,N4-dimethyl-L-asparagine
  MOD_RES 4: note (S)-3-(7-(3-acetamidophenyl)-1H-indol-3-yl)-2-aminopropanoi c acid
  MOD_RES 5: note = N6-acetyl-N6-methyl-L-lysine
  MOD_RES 6: note = L-penicillamine
  MOD_RES 7: note (S)-5-(4-(2-amino-2-carboxyethyl)phenoxy)-N,N,N-trimethylpe ntan-1-aminium
  MOD_RES 8: note = 3-(2-naphthyl)-L-alanine
  MOD_RES 9: note = 4-aminotetrahydro-2H-pyran-4-carboxylic acid
  MOD_RES 10: note = N6-acetyl-N6-methyl-L-lysine
  MOD_RES 12: note = 3-(3-Pyridyl)-L-alanine
  MOD_RES 13: note = MeGly
  SITE 13: note = C-terminal N,N-dimethylamidyl
XNTXKXXXXKNXX

SEQ ID NO: 295 - protein, 13 aa, synthetic construct
  SITE 1: note = N-terminal N,N,N-trimethyl-2-(2-(3-carbonylpropoxy)ethoxy)ethan-1-amin ium
  MOD_RES 1: note = L-penicillamine
  MOD_RES 2: note = N4,N4-dimethyl-L-asparagine
  MOD_RES 4: note = 7-methyl-L-tryptophan
  MOD_RES 5: note = N6-acetyl-N6-methyl-L-lysine
  MOD_RES 6: note = L-penicillamine
  MOD_RES 7: note (S)-8-(4-(2-amino-2-carboxyethyl)phenoxy)-N,N,N-trimethyloc tan-1-aminium
  MOD_RES 8: note = 3-(2-naphthyl)-L-alanine
  MOD_RES 9: note = 4-aminotetrahydro-2H-pyran-4-carboxylic acid
  MOD_RES 10: note = N6-acetyl-N6-methyl-L-lysine
  MOD_RES 12: note = 3-(3-Pyridyl)-L-alanine
  MOD_RES 13: note = MeGly
  SITE 13: note = C-terminal -N,N-dimethylamidyl
XNTWXXXXXXNXX

SEQ ID NO: 296 - protein, 14 aa, synthetic construct
  SITE 1: note = N-terminal (21S,28R)-1,21-dicarboxy-28-(carboxymethyl)-N,N,N-trimethyl -9,18,23,26-tetraoxo-2,5,11,14-tetraoxa-8,17,22,27-tetraaza nonacosan-29-aminium
  MOD_RES 1: note (S)-2-(4-(((R)-5-amino-5-carboxypentyl)amino)-4-oxobutanami do)-3-carboxy-N,N,N-trimethylpropan-1-aminium
  MOD_RES 2: note = L-penicillamine
  MOD_RES 5: note = 7-methyl-L-tryptophan
  MOD_RES 6: note = N6-acetyl-L-lysine
  MOD_RES 7: note = L-penicillamine
  MOD_RES 8: note = 4-(2-aminoethoxy)-L-phenylalanine
  MOD_RES 9: note = 3-(2-naphthyl)-L-alanine
  MOD_RES 10: note = 4-aminotetrahydro-2H-pyran-4-carboxylic acid
  MOD_RES 13: note = 3-(3-Pyridyl)-L-alanine
  MOD_RES 14: note = MeGly
  SITE 14: note = C-terminal amidyl
KXNTWKXXXXENXX

SEQ ID NO: 297 - protein, 13 aa, synthetic construct
  SITE 1: note = N-terminal N,N,N-trimethyl-2-(2-(3-carbonylpropoxy)ethoxy)ethan-1-amin ium
  MOD_RES 1: note = L-penicillamine
  MOD_RES 2: note = N4,N4-dimethyl-L-asparagine
  MOD_RES 4: note = 7-methyl-L-tryptophan
  MOD_RES 5: note = N6-acetyl-N6-methyl-L-lysine
  MOD_RES 6: note = L-penicillamine
  MOD_RES 7: note (S)-1-(2-(2-(2-(4-(2-amino-2-carboxyethyl)phenoxy)ethoxy)et hoxy)ethyl)pyridin-1-ium
  MOD_RES 8: note = 3-(2-naphthyl)-L-alanine
  MOD_RES 9: note = 4-aminotetrahydro-2H-pyran-4-carboxylic acid
  MOD_RES 10: note = N6-acetyl-N6-methyl-L-lysine
  MOD_RES 12: note = 3-(3-Pyridyl)-L-alanine
  MOD_RES 13: note = MeGly
  SITE 13: note = C- term N,N-dimethylamidyl
XNTWXXXXXXNXX

SEQ ID NO: 298 - protein, 13 aa, synthetic construct
  SITE 1: note = N-terminal N,N,N-trimethyl-2-(2-(3-carbonylpropoxy)ethoxy)ethan-1-amin ium
  MOD_RES 1: note = L-penicillamine
  MOD_RES 2: note = N4,N4-dimethyl-L-asparagine
  MOD_RES 4: note = 7-methyl-L-tryptophan
  MOD_RES 5: note = N6-acetyl-N6-methyl-L-lysine
  MOD_RES 6: note = L-penicillamine
  MOD_RES 7: note (S)-1-(2-(2-(2-(4-(2-amino-2-carboxyethyl)phenoxy)ethoxy)et hoxy)ethyl)-4,4-difluoro-1-methylpiperidin-1-ium
  MOD_RES 8: note = 3-(2-naphthyl)-L-alanine
  MOD_RES 9: note = 4-aminotetrahydro-2H-pyran-4-carboxylic acid
  MOD_RES 10: note = N6-acetyl-N6-methyl-L-lysine
  MOD_RES 12: note = 3-(3-Pyridyl)-L-alanine
  MOD_RES 13: note = MeGly
  SITE 13: note = C-terminal N,N-dimethylamidyl
XNTWXXXXXXNXX

SEQ ID NO: 299 - protein, 13 aa, synthetic construct
  SITE 1: note = N-terminal N,N,N-trimethyl-2-(2-(3-carbonylpropoxy)ethoxy)ethan-1-amin ium
  MOD_RES 1: note = L-penicillamine
  MOD_RES 4: note = 7-methyl-L-tryptophan
  MOD_RES 5: note = N6-acetyl-N6-methyl-L-lysine
  MOD_RES 6: note = L-penicillamine
  MOD_RES 7: note (S)-5-(4-(2-amino-2-carboxyethyl)phenoxy)-N,N,N-trimethylpe ntan-1-aminium
  MOD_RES 8: note = 3-(2-naphthyl)-L-alanine
  MOD_RES 9: note = 4-aminotetrahydro-2H-pyran-4-carboxylic acid
  MOD_RES 10: note = N6-acetyl-N6-methyl-L-lysine
  MOD_RES 12: note = 3-(3-Pyridyl)-L-alanine
  MOD_RES 13: note = MeGly
  SITE 13: note = C-terminal N,N-dimethylamidyl
XNTWXXXXXXNXX

SEQ ID NO: 300 - protein, 13 aa, synthetic construct
  SITE 1: note = N-terminal N,N,N-trimethyl-2-(2-(3-carbonylpropoxy)ethoxy)ethan-1-amin ium
  MOD_RES 1: note = L-penicillamine
  MOD_RES 2: note = N4-methyl-L-asparagine
  MOD_RES 4: note = 7-methyl-L-tryptophan
  MOD_RES 5: note = N6-acetyl-N6-methyl-L-lysine
  MOD_RES 6: note = L-penicillamine
  MOD_RES 7: note (S)-5-(4-(2-amino-2-carboxyethyl)phenoxy)-N,N,N-trimethylpe ntan-1-aminium
  MOD_RES 8: note = 3-(2-naphthyl)-L-alanine
  MOD_RES 9: note = 4-aminotetrahydro-2H-pyran-4-carboxylic acid
  MOD_RES 10: note = N6-acetyl-N6-methyl-L-lysine
  MOD_RES 12: note = 3-(3-Pyridyl)-L-alanine
  MOD_RES 13: note = MeGly
  SITE 13: note = C-terminal N,N-dimethylamidyl
XNTWXXXXXXNXX

SEQ ID NO: 301 - protein, 13 aa, synthetic construct
  SITE 1: note = N-terminal N,N,N-trimethyl-2-(2-(3-carbonylpropoxy)ethoxy)ethan-1-amin ium
  MOD_RES 1: note = L-penicillamine
  MOD_RES 2: note = N4,N4-dimethyl-L-asparagine
  MOD_RES 4: note = 7-methyl-L-tryptophan
  MOD_RES 5: note = N6-acetyl-N6-methyl-L-lysine
  MOD_RES 6: note = L-penicillamine
  MOD_RES 7: note (S)-5-(4-(2-amino-2-carboxyethyl)phenoxy)-N,N,N-trimethylpe ntan-1-aminium
  MOD_RES 8: note = 3-(2-naphthyl)-L-alanine
  MOD_RES 9: note = 4-aminotetrahydro-2H-pyran-4-carboxylic acid
  MOD_RES 10: note = (S)-2-amino-4-(N-methylacetamido)butanoic acid
  MOD_RES 12: note = 3-(3-Pyridyl)-L-alanine
  MOD_RES 13: note = MeGly
  SITE 13: note = C-terminal N,N-dimethylamidyl
XNTWXXXXXXNXX

SEQ ID NO: 302 - protein, 13 aa, synthetic construct
  SITE 1: note = N-terminal N,N,N-trimethyl-2-(2-(3-carbonylpropoxy)ethoxy)ethan-1-amin ium
  MOD_RES 1: note = L-penicillamine
  MOD_RES 2: note = N4,N4-dimethyl-L-asparagine
  MOD_RES 4: note = 7-methyl-L-tryptophan
  MOD_RES 5: note = N6-acetyl-N6-methyl-L-lysine
  MOD_RES 6: note = L-penicillamine
  MOD_RES 7: note (S)-4-(1-(4-(2-amino-2-carboxyethyl)phenyl)-1H-1,2,3-triazo l-4-yl)-N,N,N-trimethylbutan-1-aminium
  MOD_RES 8: note = 3-(2-naphthyl)-L-alanine
  MOD_RES 9: note = 4-aminotetrahydro-2H-pyran-4-carboxylic acid
  MOD_RES 10: note = N6-acetyl-N6-methyl-L-lysine
  MOD_RES 12: note = 3-(3-Pyridyl)-L-alanine
  MOD_RES 13: note = MeGly
  MOD_RES 13: note = MeGly
  SITE 13: note = C-terminal N,N-dimethylamidyl
XNTWXXXXXXNXX

SEQ ID NO: 303 - protein, 13 aa, synthetic construct
  SITE 1: note = N-terminal N,N,N-trimethyl-2-(2-(3-carbonylpropoxy)ethoxy)ethan-1-amin ium
  MOD_RES 1: note = L-penicillamine
  MOD_RES 2: note = N4,N4-dimethyl-L-asparagine
  MOD_RES 4: note = 7-methyl-L-tryptophan
  MOD_RES 5: note = N6-acetyl-N6-methyl-L-lysine
  MOD_RES 6: note = L-penicillamine
  MOD_RES 7: note (S)-2-amino-3-(4-(4-(methoxymethyl)-1H-1,2,3-triazol-1-yl)p henyl)propanoic acid
  MOD_RES 8: note = 3-(2-naphthyl)-L-alanine
  MOD_RES 9: note = 4-aminotetrahydro-2H-pyran-4-carboxylic acid
  MOD_RES 10: note = N6-acetyl-N6-methyl-L-lysine
  MOD_RES 12: note = 3-(3-Pyridyl)-L-alanine
  MOD_RES 13: note = MeGly
  SITE 13: note = C-terminal N,N-dimethylamidyl
XNTWXXXXXXNXX

SEQ ID NO: 304 - protein, 13 aa, synthetic construct
  SITE 1: note = N-terminal N,N,N-trimethyl-2-(2-(3-carbonylpropoxy)ethoxy)ethan-1-amin ium
  MOD_RES 1: note = L-penicillamine
  MOD_RES 2: note = N4,N4-dimethyl-L-asparagine
  MOD_RES 4: note = 7-methyl-L-tryptophan
  MOD_RES 5: note = N6-acetyl-N6-methyl-L-lysine
  MOD_RES 6: note = L-penicillamine
  MOD_RES 7: note = 4-[(Aminoiminomethyl)amino]-L-phenylalanine
  MOD_RES 8: note = 3-(2-naphthyl)-L-alanine
  MOD_RES 9: note = 4-aminotetrahydro-2H-pyran-4-carboxylic acid
  MOD_RES 10: note = N6-acetyl-N6-methyl-L-lysine
  MOD_RES 12: note = 3-(3-Pyridyl)-L-alanine
  MOD_RES 13: note = MeGly
  SITE 13: note = C-terminal N,N-dimethylamidyl
XNTWXXXXXXNXX

SEQ ID NO: 305 - protein, 13 aa, synthetic construct
  SITE 1: note = N-terminal N,N,N-trimethyl-2-(2-(3-carbonylpropoxy)ethoxy)ethan-1-amin ium
  MOD_RES 1: note = L-penicillamine
  MOD_RES 2: note = N4,N4-dimethyl-L-asparagine
  MOD_RES 4: note = 7-methyl-L-tryptophan
  MOD_RES 6: note = L-penicillamine
  MOD_RES 7: note (S,E)-2-(((2-(4-(2-amino-2-carboxyethyl)phenoxy)ethylidene) amino)oxy)-N,N,N-trimethylethan-1-aminium
  MOD_RES 8: note = 3-(2-naphthyl)-L-alanine
  MOD_RES 9: note = 4-aminotetrahydro-2H-pyran-4-carboxylic acid
  MOD_RES 10: note = N6-acetyl-N6-methyl-L-lysine
  MOD_RES 12: note = 3-(3-Pyridyl)-L-alanine
  MOD_RES 13: note = MeGly
  SITE 13: note = C-terminal N,N-dimethylamidy
XNTWXXXXXXNXX

SEQ ID NO: 306 - protein, 13 aa, synthetic construct
  SITE 1: note = N-terminal N,N,N-trimethyl-2-(2-(3-carbonylpropoxy)ethoxy)ethan-1-amin ium
  MOD_RES 1: note = L-penicillamine
  MOD_RES 2: note = N4,N4-dimethyl-L-asparagine
  MOD_RES 4: note = 7-methyl-L-tryptophan
  MOD_RES 5: note = N6-acetyl-N6-methyl-L-lysine
  MOD_RES 6: note = L-penicillamine
  MOD_RES 7: note (S,Z)-2-(((2-(4-(2-amino-2-carboxyethyl)phenoxy)ethylidene) amino)oxy)-N,N,N-trimethylethan-1-aminium
  MOD_RES 8: note = 3-(2-naphthyl)-L-alanine
  MOD_RES 9: note = 4-aminotetrahydro-2H-pyran-4-carboxylic acid
  MOD_RES 10: note = N6-acetyl-N6-methyl-L-lysine
  MOD_RES 12: note = 3-(3-Pyridyl)-L-alanine
  MOD_RES 13: note = MeGly
  SITE 13: note = C-terminal N,N-dimethylamidyl
XNTWXXXXXXNXX

SEQ ID NO: 307 - protein, 13 aa, synthetic construct
  SITE 1: note = N-terminal N,N,N-trimethyl-2-(2-(3-carbonylpropoxy)ethoxy)ethan-1-amin ium
  MOD_RES 1: note = L-penicillamine
  MOD_RES 2: note = N4,N4-dimethyl-L-asparagine
  MOD_RES 4: note = 7-methyl-L-tryptophan
  MOD_RES 5: note = N6-acetyl-N6-methyl-L-lysine
  MOD_RES 6: note = L-penicillamine
  MOD_RES 7: note (S)-5-(4-(2-amino-2-carboxyethyl)phenoxy)-N,N,N-trimethylpe ntan-1-aminium
  MOD_RES 8: note = 3-(2-naphthyl)-L-alanine
  MOD_RES 9: note = 4-aminotetrahydro-2H-pyran-4-carboxylic acid
  MOD_RES 10: note = N6-acetyl-N6-methyl-L-lysine
  MOD_RES 12: note = 3-(3-Pyridyl)-L-alanine
  MOD_RES 13: note (S)-2-(methylamino)-8,17,26-trioxo-10,13,19,22-tetraoxa-7,1 6,25-triazaheptatriacontanoic acid
  SITE 13: note = C-terminal amidyl
XNTWXXXXXXNXX

SEQ ID NO: 308 - protein, 13 aa, synthetic construct
  SITE 1: note = N-terminal N,N,N-trimethyl-2-(2-(3-carbonylpropoxy)ethoxy)ethan-1-amin ium
  MOD_RES 1: note = L-penicillamine
  MOD_RES 2: note = N4,N4-dimethyl-L-asparagine
  MOD_RES 4: note = 7-methyl-L-tryptophan
  MOD_RES 5: note = N6-acetyl-L-lysine
  MOD_RES 6: note = L-penicillamine
  MOD_RES 7: note (S)-5-(4-(2-amino-2-carboxyethyl)phenoxy)-N,N,N-trimethylpe ntan-1-aminium
  MOD_RES 8: note = 3-(2-naphthyl)-L-alanine
  MOD_RES 9: note = 4-aminotetrahydro-2H-pyran-4-carboxylic acid
  MOD_RES 10: note = (S)-2-amino-4-(N-methylacetamido)butanoic acid
  MOD_RES 12: note = 3-(3-Pyridyl)-L-alanine
  MOD_RES 13: note = MeGly
  SITE 13: note = C-terminal N,N-dimethylamidyl
XNTWKXXXXXNXX

SEQ ID NO: 309 - protein, 13 aa, synthetic construct
  SITE 1: note = N-terminal N,N,N-trimethyl-2-(2-(3-carbonylpropoxy)ethoxy)ethan-1-amin ium
  MOD_RES 1: note = L-penicillamine
  MOD_RES 4: note = 7-methyl-L-tryptophan
  MOD_RES 5: note = N6-acetyl-N6-methyl-L-lysine
  MOD_RES 6: note = L-penicillamine
  MOD_RES 7: note (S)-5-(4-(2-amino-2-carboxyethyl)phenoxy)-N,N,N-trimethylpe ntan-1-aminium
  MOD_RES 8: note = 3-(2-naphthyl)-L-alanine
  MOD_RES 9: note = 4-aminotetrahydro-2H-pyran-4-carboxylic acid
  MOD_RES 10: note = (S)-2-amino-4-(N-methylacetamido)butanoic acid
  MOD_RES 12: note = 3-(3-Pyridyl)-L-alanine
  MOD_RES 13: note = MeGly
  SITE 13: note = C-terminal N,N-dimethylamidyl
XNTWXXXXXXNXX

SEQ ID NO: 310 - protein, 13 aa, synthetic construct
  SITE 1: note = N-terminal N,N,N-trimethyl-2-(2-(3-carbonylpropoxy)ethoxy)ethan-1-amin ium
  MOD_RES 1: note = L-penicillamine
  MOD_RES 2: note = N4,N4-dimethyl-L-asparagine
  MOD_RES 4: note = 7-methyl-L-tryptophan
  MOD_RES 5: note = N6-acetyl-N6-methyl-L-lysine
  MOD_RES 6: note = L-penicillamine
  MOD_RES 7: note (S)-5-(4-(2-amino-2-carboxyethyl)phenoxy)-N,N,N-trimethylpe ntan-1-aminium
  MOD_RES 8: note = 3-(2-naphthyl)-L-alanine
  MOD_RES 9: note = 4-aminotetrahydro-2H-pyran-4-carboxylic acid
  MOD_RES 10: note = N5,N5-dimethyl-L-glutamine
  MOD_RES 12: note = 3-(3-Pyridyl)-L-alanine
  MOD_RES 13: note = MeGly
  SITE 13: note = C-terminal N,N-dimethylamidyl
XNTWXXXXXXNXX

SEQ ID NO: 311 - protein, 13 aa, synthetic construct
  SITE 1: note = N-terminal N,N,N-trimethyl-2-(2-(3-carbonylpropoxy)ethoxy)ethan-1-amin ium
  MOD_RES 1: note = L-penicillamine
  MOD_RES 4: note = 7-methyl-L-tryptophan
  MOD_RES 5: note = (S)-2-amino-4-(N-methylacetamido)butanoic acid
  MOD_RES 6: note = L-penicillamine
  MOD_RES 7: note (S)-5-(4-(2-amino-2-carboxyethyl)phenoxy)-N,N,N-trimethylpe ntan-1-aminium
  MOD_RES 8: note = 3-(2-naphthyl)-L-alanine
  MOD_RES 9: note = 4-aminotetrahydro-2H-pyran-4-carboxylic acid
  MOD_RES 10: note = N6-acetyl-N6-methyl-L-lysine
  MOD_RES 12: note = 3-(3-Pyridyl)-L-alanine
  MOD_RES 13: note = MeGly
  SITE 13: note = C-terminal N,N-dimethylamidyl
XNTWXXXXXXNXX

SEQ ID NO: 312 - protein, 13 aa, synthetic construct
  SITE 1: note = N-terminal N,N,N-trimethyl-2-(2-(3-carbonylpropoxy)ethoxy)ethan-1-amin ium
  MOD_RES 1: note = L-penicillamine
  MOD_RES 2: note = N4,N4-dimethyl-L-asparagine
  MOD_RES 4: note = 7-methyl-L-tryptophan
  MOD_RES 5: note = N5,N5-dimethyl-L-glutamine
  MOD_RES 6: note = L-penicillamine
  MOD_RES 7: note (S)-5-(4-(2-amino-2-carboxyethyl)phenoxy)-N,N,N-trimethylpe ntan-1-aminium
  MOD_RES 8: note = 3-(2-naphthyl)-L-alanine
  MOD_RES 9: note = 4-aminotetrahydro-2H-pyran-4-carboxylic acid
  MOD_RES 10: note = N6-acetyl-N6-methyl-L-lysine
  MOD_RES 12: note = 3-(3-Pyridyl)-L-alanine
  MOD_RES 13: note = MeGly
  SITE 13: note = C-terminal N,N-dimethylamidyl
XNTWXXXXXXNXX

SEQ ID NO: 313 - protein, 13 aa, synthetic construct
  SITE 1: note = N-terminal N,N,N-trimethyl-2-(2-(3-carbonylpropoxy)ethoxy)ethan-1-amin ium
  MOD_RES 1: note = L-penicillamine
  MOD_RES 2: note = N4,N4-dimethyl-L-asparagine
  MOD_RES 4: note = 7-methyl-L-tryptophan
  MOD_RES 5: note = N6-acetyl-L-lysine
  MOD_RES 6: note = L-penicillamine
  MOD_RES 7: note (S)-5-(4-(2-amino-2-carboxyethyl)phenoxy)-N,N,N-trimethylpe ntan-1-aminium
  MOD_RES 8: note = 3-(2-naphthyl)-L-alanine
  MOD_RES 9: note = 4-aminotetrahydro-2H-pyran-4-carboxylic acid
  MOD_RES 10: note = N6-acetyl-N6-methyl-L-lysine
  MOD_RES 12: note = 3-(3-Pyridyl)-L-alanine
  MOD_RES 13: note (2S,29S)-29-(methylamino)-5,14,23-trioxo-2-tetradecanamido- 9,12,18,21-tetraoxa-6,15,24-triazatriacontanedioic acid
  SITE 13: note = C-terminal N,N-dimethylamidyl
XNTWKXXXXXNXX

SEQ ID NO: 314 - protein, 13 aa, synthetic construct
  SITE 1: note = N-terminal N,N,N-trimethyl-2-(2-(3-carbonylpropoxy)ethoxy)ethan-1-amin ium
  MOD_RES 1: note = L-penicillamine
  MOD_RES 2: note = N4,N4-dimethyl-L-asparagine
  MOD_RES 4: note = 7-methyl-L-tryptophan
  MOD_RES 5: note = N6-acetyl-N6-methyl-L-lysine
  MOD_RES 6: note = L-penicillamine
  MOD_RES 7: note (S)-5-(4-(2-amino-2-carboxyethyl)phenoxy)-N,N,N-trimethylpe ntan-1-aminium
  MOD_RES 8: note = 3-(2-naphthyl)-L-alanine
  MOD_RES 9: note = 4-aminotetrahydro-2H-pyran-4-carboxylic acid
  MOD_RES 10: note = N6-acetyl-N6-methyl-L-lysine
  MOD_RES 12: note = 3-(3-Pyridyl)-L-alanine
  MOD_RES 13: note (2S,29S)-29-(methylamino)-5,14,23-trioxo-2-tetradecanamido- 9,12,18,21-tetraoxa-6,15,24-triazatriacontanedioic acid
  SITE 13: note = C-terminal amidyl
XNTWXXXXXXNXX

SEQ ID NO: 315 - protein, 13 aa, synthetic construct
  SITE 1: note = N-terminal N,N,N-trimethyl-2-(2-(3-carbonylpropoxy)ethoxy)ethan-1-amin ium
  MOD_RES 1: note = L-penicillamine
  MOD_RES 2: note = N4,N4-dimethyl-L-asparagine
  MOD_RES 4: note = 7-methyl-L-tryptophan
  MOD_RES 5: note = N6-acetyl-N6-methyl-L-lysine
  MOD_RES 6: note = L-penicillamine
  MOD_RES 7: note (S)-5-(4-(2-amino-2-carboxyethyl)phenoxy)-N,N,N-trimethylpe ntan-1-aminium
  MOD_RES 8: note = 3-(2-naphthyl)-L-alanine
  MOD_RES 9: note = 4-aminotetrahydro-2H-pyran-4-carboxylic acid
  MOD_RES 10: note = N6-acetyl-N6-methyl-L-lysine
  MOD_RES 12: note = 3-(3-Pyridyl)-L-alanine
  MOD_RES 13: note (2S,29S)-29-(methylamino)-5,14,23-trioxo-2-palmitamido-9,12 ,18,21-tetraoxa-6,15,24-triazatriacontanedioic acid
  SITE 13: note = C-terminal amidyl
XNTWXXXXXXNXX

SEQ ID NO: 316 - protein, 13 aa, synthetic construct
  SITE 1: note = N-terminal N,N,N-trimethyl-2-(2-(3-carbonylpropoxy)ethoxy)ethan-1-amin ium
  MOD_RES 1: note = L-penicillamine
  MOD_RES 2: note = N4,N4-dimethyl-L-asparagine
  MOD_RES 4: note = 7-methyl-L-tryptophan
  MOD_RES 5: note = N6-acetyl-N6-methyl-L-lysine
  MOD_RES 6: note = L-penicillamine
  MOD_RES 7: note (S)-5-(4-(2-amino-2-carboxyethyl)phenoxy)-N,N,N-trimethylpe ntan-1-aminium
  MOD_RES 8: note = 3-(2-naphthyl)-L-alanine
  MOD_RES 9: note = 4-aminotetrahydro-2H-pyran-4-carboxylic acid
  MOD_RES 12: note = 3-(3-Pyridyl)-L-alanine
  MOD_RES 13: note = MeGly
  SITE 13: note = C-terminal N,N-dimethylamidyl
XNTWXXXXXANXX

SEQ ID NO: 317 - protein, 13 aa, synthetic construct
  SITE 1: note = N-terminal N,N,N-trimethyl-2-(2-(3-carbonylpropoxy)ethoxy)ethan-1-amin ium
  MOD_RES 1: note = L-penicillamine
  MOD_RES 4: note = 7-methyl-L-tryptophan
  MOD_RES 5: note = N6-acetyl-L-lysine
  MOD_RES 6: note = L-penicillamine
  MOD_RES 7: note (S)-5-(4-(2-amino-2-carboxyethyl)phenoxy)-N,N,N-trimethylpe ntan-1-aminium
  MOD_RES 8: note = 3-(2-naphthyl)-L-alanine
  MOD_RES 9: note = 4-aminotetrahydro-2H-pyran-4-carboxylic acid
  MOD_RES 12: note = 3-(3-Pyridyl)-L-alanine
  MOD_RES 13: note = MeGly
  SITE 13: note = C-terminal N,N-dimethylamidyl
XNTWKXXXXANXX

SEQ ID NO: 318 - protein, 14 aa, synthetic construct
  SITE 1: note = N-terminal acetyl
  MOD_RES 1: note (S)-2-(2-(2-amino-2-carboxyethoxy)ethoxy)-N,N,N-trimethylet han-1-aminium
  MOD_RES 2: note = L-penicillamine
  MOD_RES 3: note = N4,N4-dimethyl-L-asparagine
  MOD_RES 5: note = 7-methyl-L-tryptophan
  MOD_RES 6: note = N6-acetyl-N6-methyl-L-lysine
  MOD_RES 7: note = L-penicillamine
  MOD_RES 8: note (S)-2-(2-(2-(4-(2-amino-2-carboxyethyl)phenoxy)ethoxy)ethox y)-N,N,N-trimethylethan-1-aminium
  MOD_RES 9: note = 3-(2-naphthyl)-L-alanine
  MOD_RES 10: note = 4-aminotetrahydro-2H-pyran-4-carboxylic acid
  MOD_RES 11: note = N6-acetyl-N6-methyl-L-lysine
  MOD_RES 13: note = 3-(3-Pyridyl)-L-alanine
  MOD_RES 14: note = MeGly
  SITE 14: note = C-terminal N,N-dimethylamidyl
XXNTWXXXXXXNXX

SEQ ID NO: 319 - protein, 14 aa, synthetic construct
  SITE 1: note = N-terminal acetyl
  MOD_RES 1: note (R)-2-(2-(2-amino-2-carboxyethoxy)ethoxy)-N,N,N-trimethylet han-1-aminium
  MOD_RES 2: note = L-penicillamine
  MOD_RES 3: note = N4,N4-dimethyl-L-asparagine
  MOD_RES 5: note = 7-methyl-L-tryptophan
  MOD_RES 6: note = N6-acetyl-N6-methyl-L-lysine
  MOD_RES 7: note = L-penicillamine
  MOD_RES 8: note (S)-2-(2-(2-(4-(2-amino-2-carboxyethyl)phenoxy)ethoxy)ethox y)-N,N,N-trimethylethan-1-aminium
  MOD_RES 9: note = 3-(2-naphthyl)-L-alanine
  MOD_RES 10: note = 4-aminotetrahydro-2H-pyran-4-carboxylic acid
  MOD_RES 11: note = N6-acetyl-N6-methyl-L-lysine
  MOD_RES 13: note = 3-(3-Pyridyl)-L-alanine
  MOD_RES 14: note = MeGly
  SITE 14: note = C-terminal N,N-dimethylamidyl
XXNTWXXXXXXNXX

SEQ ID NO: 320 - protein, 13 aa, synthetic construct
  SITE 1: note = N-terminal N,N,N-trimethyl-2-(2-(3-carbonylpropoxy)ethoxy)ethan-1-amin ium
  MOD_RES 1: note = L-penicillamine
  MOD_RES 2: note = N4,N4-dimethyl-L-asparagine
  MOD_RES 4: note = 7-methyl-L-tryptophan
  MOD_RES 5: note = N6-acetyl-N6-methyl-L-lysine
  MOD_RES 6: note = L-penicillamine
  MOD_RES 7: note = 4-(2-aminoethoxy)-L-phenylalanine
  MOD_RES 8: note = 3-(2-naphthyl)-L-alanine
  MOD_RES 9: note = 4-aminotetrahydro-2H-pyran-4-carboxylic acid
  MOD_RES 10: note = N6-acetyl-N6-methyl-L-lysine
  MOD_RES 12: note = 3-(3-Pyridyl)-L-alanine
  MOD_RES 13: note = MeGly
  SITE 13: note = C-terminal N,N-dimethylamidyl
XNTWXXXXXXNXX

SEQ ID NO: 321 - protein, 13 aa, synthetic construct
  SITE 1: note = N-terminal N,N,N-trimethyl-2-(2-(3-carbonylpropoxy)ethoxy)ethan-1-amin ium
  MOD_RES 1: note = L-penicillamine
  MOD_RES 2: note = N4,N4-dimethyl-L-asparagine
  MOD_RES 4: note = 7-methyl-L-tryptophan
  MOD_RES 5: note = N6-acetyl-N6-methyl-L-lysine
  MOD_RES 6: note = L-penicillamine
  MOD_RES 7: note (S)-2-amino-3-(4-(2-(dimethylamino)ethoxy)phenyl)propanoic acid
  MOD_RES 8: note = 3-(2-naphthyl)-L-alanine
  MOD_RES 9: note = 4-aminotetrahydro-2H-pyran-4-carboxylic acid
  MOD_RES 10: note = N6-acetyl-N6-methyl-L-lysine
  MOD_RES 12: note = 3-(3-Pyridyl)-L-alanine
  MOD_RES 13: note = MeGly
  SITE 13: note = C-terminal N,N-dimethylamidyl
XNTWXXXXXXNXX

SEQ ID NO: 322 - protein, 14 aa, synthetic construct
  SITE 1: note = N-terminal PEG side chain
  MOD_RES 1: note = (R)-6-amino-6-carboxy-N,N,N-trimethylhexan-1-aminium
  MOD_RES 2: note = L-penicillamine
  MOD_RES 3: note = N4,N4-dimethyl-L-asparagine
  MOD_RES 5: note = 7-methyl-L-tryptophan
  MOD_RES 6: note = N6-acetyl-N6-methyl-L-lysine
  MOD_RES 7: note = L-penicillamine
  MOD_RES 8: note (S)-5-(4-(2-amino-2-carboxyethyl)phenoxy)-N,N,N-trimethylpe ntan-1-aminium
  MOD_RES 9: note = 3-(2-naphthyl)-L-alanine
  MOD_RES 10: note = 4-aminotetrahydro-2H-pyran-4-carboxylic acid
  MOD_RES 11: note = N6-acetyl-N6-methyl-L-lysine
  MOD_RES 13: note = 3-(3-Pyridyl)-L-alanine
  MOD_RES 14: note = MeGly
  SITE 14: note = C-terminal N,N-dimethylamidyl
KXNTWXXXXXXNXX

SEQ ID NO: 323 - protein, 14 aa, synthetic construct
  SITE 1: note = N-terminal PEG side chain
  MOD_RES 1: note = (R)-6-amino-6-carboxy-N,N,N-trimethylhexan-1-aminium
  MOD_RES 2: note = L-penicillamine
  MOD_RES 3: note = N4,N4-dimethyl-L-asparagine
  MOD_RES 5: note = 7-methyl-L-tryptophan
  MOD_RES 6: note (2S,39S)-39-amino-5,24,33-trioxo-2-tridecanamido-9,12,15,18 ,21,28,31-heptaoxa-6,25,34-triazatetracontanedioic acid
  MOD_RES 7: note = L-penicillamine
  MOD_RES 8: note (S)-5-(4-(2-amino-2-carboxyethyl)phenoxy)-N,N,N-trimethylpe ntan-1-aminium
  MOD_RES 9: note = 3-(2-naphthyl)-L-alanine
  MOD_RES 10: note = 4-aminotetrahydro-2H-pyran-4-carboxylic acid
  MOD_RES 11: note = N6-acetyl-N6-methyl-L-lysine
  MOD_RES 13: note = 3-(3-Pyridyl)-L-alanine
  MOD_RES 14: note = MeGly
  SITE 14: note = C-terminal N,N-dimethylamidyl
KXNTWXXXXXXNXX

SEQ ID NO: 324 - protein, 14 aa, synthetic construct
  SITE 1: note = N-terminal PEG side chain
  MOD_RES 1: note = (R)-6-amino-6-carboxy-N,N,N-trimethylhexan-1-aminium
  MOD_RES 2: note = L-penicillamine
  MOD_RES 3: note = N4,N4-dimethyl-L-asparagine
  MOD_RES 5: note = 7-methyl-L-tryptophan
  MOD_RES 6: note = N6-acetyl-N6-methyl-L-lysine
  MOD_RES 7: note = L-penicillamine
  MOD_RES 8: note (S)-5-(4-(2-amino-2-carboxyethyl)phenoxy)-N,N,N-trimethylpe ntan-1-aminium
  MOD_RES 9: note = 3-(2-naphthyl)-L-alanine
  MOD_RES 10: note = 4-aminotetrahydro-2H-pyran-4-carboxylic acid
  MOD_RES 11: note = N6-acetyl-N6-methyl-L-lysine
  MOD_RES 13: note = 3-(3-Pyridyl)-L-alanine
  MOD_RES 14: note = MeGly
  SITE 14: note = C-terminal N,N-dimethylamidyl
KXNTWXXXXXXNXX

SEQ ID NO: 325 - protein, 14 aa, synthetic construct
  SITE 1: note = N-terminal PEG side chain
  MOD_RES 1: note = (R)-6-amino-6-carboxy-N,N,N-trimethylhexan-1-aminium
  MOD_RES 2: note = L-penicillamine
  MOD_RES 3: note = N4,N4-dimethyl-L-asparagine
  MOD_RES 5: note = 7-methyl-L-tryptophan
  MOD_RES 6: note (2S,39S)-39-amino-5,24,33-trioxo-2-pentadecanamido-9,12,15, 18,21,28,31-heptaoxa-6,25,34-triazatetracontanedioic acid
  MOD_RES 7: note = L-penicillamine
  MOD_RES 8: note (S)-5-(4-(2-amino-2-carboxyethyl)phenoxy)-N,N,N-trimethylpe ntan-1-aminium
  MOD_RES 9: note = 3-(2-naphthyl)-L-alanine
  MOD_RES 10: note = 4-aminotetrahydro-2H-pyran-4-carboxylic acid
  MOD_RES 11: note = N6-acetyl-N6-methyl-L-lysine
  MOD_RES 13: note = 3-(3-Pyridyl)-L-alanine
  MOD_RES 14: note = MeGly
  SITE 14: note = C-terminal N,N-dimethylamidyl
KXNTWXXXXXXNXX

SEQ ID NO: 326 - protein, 13 aa, synthetic construct
  SITE 1: note = N-terminal N,N,N-trimethyl-2-(2-(3-carbonylpropoxy)ethoxy)ethan-1-amin ium
  MOD_RES 1: note = L-penicillamine
  MOD_RES 2: note = N4,N4-dimethyl-L-asparagine
  MOD_RES 4: note = 7-methyl-L-tryptophan
  MOD_RES 5: note = N6-acetyl-N6-methyl-L-lysine
  MOD_RES 6: note = L-penicillamine
  MOD_RES 7: note (S)-5-(4-(2-amino-2-carboxyethyl)phenoxy)-N,N,N-trimethylpe ntan-1-aminium
  MOD_RES 8: note = 3-(2-naphthyl)-L-alanine
  MOD_RES 9: note = 4-aminotetrahydro-2H-pyran-4-carboxylic acid
  MOD_RES 10: note = N6-acetyl-N6-methyl-L-lysine
  MOD_RES 12: note = 3-(3-Pyridyl)-L-alanine
  MOD_RES 13: note = MeGly
  SITE 13: note = C-terminal amidyl
XNTWXXXXXXNXX

SEQ ID NO: 327 - protein, 13 aa, synthetic construct
  SITE 1: note = N-terminal N,N,N-trimethyl-2-(2-(3-carbonylpropoxy)ethoxy)ethan-1-amin ium
  MOD_RES 1: note = L-penicillamine
  MOD_RES 2: note = N4,N4-dimethyl-L-asparagine
  MOD_RES 4: note = 7-methyl-L-tryptophan
  MOD_RES 5: note = N6-acetyl-N6-methyl-L-lysine
  MOD_RES 6: note = L-penicillamine
  MOD_RES 7: note (S)-5-(4-(2-amino-2-carboxyethyl)phenoxy)-N,N,N-trimethylpe ntan-1-aminium
  MOD_RES 8: note = 3-(2-naphthyl)-L-alanine
  MOD_RES 9: note = 4-aminotetrahydro-2H-pyran-4-carboxylic acid
  MOD_RES 10: note = (S)-2-amino-5-ureidopentanoic acid
  MOD_RES 12: note = 3-(3-Pyridyl)-L-alanine
  MOD_RES 13: note = MeGly
  SITE 13: note = C-terminal N,N-dimethylamidyl
XNTWXXXXXXNXX

SEQ ID NO: 328 - protein, 13 aa, synthetic construct
  SITE 1: note = N-terminal N,N,N-trimethyl-2-(2-(3-carbonylpropoxy)ethoxy)ethan-1-amin ium
  MOD_RES 1: note = L-penicillamine
  MOD_RES 2: note = (R)-5-amino-5-carboxy-N,N,N-trimethylpentan-1-aminium
  MOD_RES 4: note = 7-methyl-L-tryptophan
  MOD_RES 5: note = N6-acetyl-N6-methyl-L-lysine
  MOD_RES 6: note = L-penicillamine
  MOD_RES 7: note (S)-5-(4-(2-amino-2-carboxyethyl)phenoxy)-N,N,N-trimethylpe ntan-1-aminium
  MOD_RES 8: note = 3-(2-naphthyl)-L-alanine
  MOD_RES 9: note = 4-aminotetrahydro-2H-pyran-4-carboxylic acid
  MOD_RES 10: note = N6-acetyl-N6-methyl-L-lysine
  MOD_RES 12: note = 3-(3-Pyridyl)-L-alanine
  MOD_RES 13: note = MeGly
  SITE 13: note = C-terminal N,N-dimethylamidyl
XKTWXXXXXXNXX

SEQ ID NO: 329 - protein, 13 aa, synthetic construct
  SITE 1: note = N-terminal N,N,N-trimethyl-2-(2-(3-carbonylpropoxy)ethoxy)ethan-1-amin ium
  MOD_RES 1: note = L-penicillamine
  MOD_RES 2: note = N4,N4-dimethyl-L-asparagine
  MOD_RES 4: note = 7-methyl-L-tryptophan
  MOD_RES 5: note = (R)-5-amino-5-carboxy-N,N,N-trimethylpentan-1-aminium
  MOD_RES 6: note = L-penicillamine
  MOD_RES 7: note (S)-5-(4-(2-amino-2-carboxyethyl)phenoxy)-N,N,N-trimethylpe ntan-1-aminium
  MOD_RES 8: note = 3-(2-naphthyl)-L-alanine
  MOD_RES 9: note = 4-aminotetrahydro-2H-pyran-4-carboxylic acid
  MOD_RES 10: note = N6-acetyl-N6-methyl-L-lysine
  MOD_RES 12: note = 3-(3-Pyridyl)-L-alanine
  MOD_RES 13: note = MeGly
  SITE 13: note = C-terminal N,N-dimethylamidyl
XNTWKXXXXXNXX

SEQ ID NO: 330 - protein, 13 aa, synthetic construct
  SITE 1: note = N-terminal N,N,N-trimethyl-2-(2-(3-carbonylpropoxy)ethoxy)ethan-1-amin ium
  MOD_RES 1: note = L-penicillamine
  MOD_RES 2: note = N4,N4-dimethyl-L-asparagine
  MOD_RES 4: note = 7-methyl-L-tryptophan
  MOD_RES 5: note = N6-acetyl-N6-methyl-L-lysine
  MOD_RES 6: note = L-penicillamine
  MOD_RES 7: note (S)-5-(4-(2-amino-2-carboxyethyl)phenoxy)-N,N,N-trimethylpe ntan-1-aminium
  MOD_RES 8: note = 3-(2-naphthyl)-L-alanine
  MOD_RES 9: note = 1-aminocyclopentane-1-carboxylic acid
  MOD_RES 10: note = N6-acetyl-N6-methyl-L-lysine
  MOD_RES 12: note = 3-(3-Pyridyl)-L-alanine
  MOD_RES 13: note = MeGly
  SITE 13: note = C-terminal N,N-dimethylamidyl
XNTWXXXXXXNXX

SEQ ID NO: 331 - protein, 13 aa, synthetic construct
  SITE 1: note = N-terminal N,N,N-trimethyl-2-(2-(3-carbonylpropoxy)ethoxy)ethan-1-amin ium
  MOD_RES 1: note = L-penicillamine
  MOD_RES 2: note = N4,N4-dimethyl-L-asparagine
  MOD_RES 4: note = 7-methyl-L-tryptophan
  MOD_RES 5: note = N6-acetyl-N6-methyl-L-lysine
  MOD_RES 6: note = L-penicillamine
  MOD_RES 7: note = p-Azido-L-phenylalanine
  MOD_RES 8: note = 3-(2-naphthyl)-L-alanine
  MOD_RES 9: note = 4-aminotetrahydro-2H-pyran-4-carboxylic acid
  MOD_RES 10: note = N6-acetyl-N6-methyl-L-lysine
  MOD_RES 12: note = 3-(3-Pyridyl)-L-alanine
  MOD_RES 13: note = MeGly
  SITE 13: note = C-terminal N,N-dimethylamidyl
XNTWXXXXXXNXX

SEQ ID NO: 332 - protein, 13 aa, synthetic construct
  SITE 1: note = N-terminal N,N,N-trimethyl-2-(2-(3-carbonylpropoxy)ethoxy)ethan-1-amin ium
  MOD_RES 1: note = L-penicillamine
  MOD_RES 2: note = N4,N4-dimethyl-L-asparagine
  MOD_RES 4: note = 7-methyl-L-tryptophan
  MOD_RES 5: note = N6-acetyl-N6-methyl-L-lysine
  MOD_RES 6: note = L-penicillamine
  MOD_RES 7: note (S)-1-(1-(4-(2-amino-2-carboxyethyl)phenyl)-1H-1,2,3-triazo l-4-yl)-N,N,N-trimethylmethanaminium
  MOD_RES 8: note = 3-(2-naphthyl)-L-alanine
  MOD_RES 9: note = 4-aminotetrahydro-2H-pyran-4-carboxylic acid
  MOD_RES 10: note = N6-acetyl-N6-methyl-L-lysine
  MOD_RES 12: note = 3-(3-Pyridyl)-L-alanine
  MOD_RES 13: note = MeGly
  SITE 13: note = C-terminal N,N-dimethylamidyl
XNTWXXXXXXNXX

SEQ ID NO: 333 - protein, 13 aa, synthetic construct
  SITE 1: note = N-terminal N,N,N-trimethyl-2-(2-(3-carbonylpropoxy)ethoxy)ethan-1-amin ium
  MOD_RES 1: note = L-penicillamine
  MOD_RES 2: note = N4,N4-dimethyl-L-asparagine
  MOD_RES 4: note = 7-methyl-L-tryptophan
  MOD_RES 5: note = N6-acetyl-N6-methyl-L-lysine
  MOD_RES 6: note = L-penicillamine
  MOD_RES 7: note (S)-2-(1-(4-(2-amino-2-carboxyethyl)phenyl)-1H-1,2,3-triazo l-4-yl)-N,N,N-trimethylethan-1-aminium
  MOD_RES 8: note = 3-(2-naphthyl)-L-alanine
  MOD_RES 9: note = 4-aminotetrahydro-2H-pyran-4-carboxylic acid
  MOD_RES 10: note = N6-acetyl-N6-methyl-L-lysine
  MOD_RES 12: note = 3-(3-Pyridyl)-L-alanine
  MOD_RES 13: note = MeGly
  SITE 13: note = C-terminal N,N-dimethylamidyl
XNTWXXXXXXNXX

SEQ ID NO: 334 - protein, 13 aa, synthetic construct
  SITE 1: note = N-terminal N,N,N-trimethyl-2-(2-(3-carbonylpropoxy)ethoxy)ethan-1-amin ium
  MOD_RES 1: note = L-penicillamine
  MOD_RES 2: note = N4,N4-dimethyl-L-asparagine
  MOD_RES 4: note = 7-methyl-L-tryptophan
  MOD_RES 5: note = N6-acetyl-N6-methyl-L-lysine
  MOD_RES 6: note = L-penicillamine
  MOD_RES 7: note (S)-3-(1-(4-(2-amino-2-carboxyethyl)phenyl)-1H-1,2,3-triazo l-4-yl)-N,N,N-trimethylpropan-1-aminium
  MOD_RES 8: note = 3-(2-naphthyl)-L-alanine
  MOD_RES 9: note = 4-aminotetrahydro-2H-pyran-4-carboxylic acid
  MOD_RES 10: note = N6-acetyl-N6-methyl-L-lysine
  MOD_RES 12: note = 3-(3-Pyridyl)-L-alanine
  MOD_RES 13: note = MeGly
  SITE 13: note = C-terminal N,N-dimethylamidyl
XNTWXXXXXXNXX

SEQ ID NO: 335 - protein, 13 aa, synthetic construct
  SITE 1: note = N-terminal N,N,N-trimethyl-2-(2-(3-carbonylpropoxy)ethoxy)ethan-1-amin ium
  MOD_RES 1: note = L-penicillamine
  MOD_RES 2: note = N4,N4-dimethyl-L-asparagine
  MOD_RES 4: note = 7-methyl-L-tryptophan
  MOD_RES 5: note = N6-acetyl-N6-methyl-L-lysine
  MOD_RES 6: note = L-penicillamine
  MOD_RES 7: note (S)-5-(1-(4-(2-amino-2-carboxyethyl)phenyl)-1H-1,2,3-triazo l-4-yl)-N,N,N-trimethylpentan-1-aminium
  MOD_RES 8: note = 3-(2-naphthyl)-L-alanine
  MOD_RES 9: note = 4-aminotetrahydro-2H-pyran-4-carboxylic acid
  MOD_RES 10: note = N6-acetyl-N6-methyl-L-lysine
  MOD_RES 12: note = 3-(3-Pyridyl)-L-alanine
  MOD_RES 13: note = MeGly
  SITE 13: note = C-terminal N,N-dimethylamidyl
XNTWXXXXXXNXX

SEQ ID NO: 336 - protein, 13 aa, synthetic construct
  SITE 1: note = N-terminal N,N,N-trimethyl-2-(2-(3-carbonylpropoxy)ethoxy)ethan-1-amin ium
  MOD_RES 1: note = L-penicillamine
  MOD_RES 2: note = N4,N4-dimethyl-L-asparagine
  MOD_RES 4: note = 7-methyl-L-tryptophan
  MOD_RES 5: note = N6-acetyl-N6-methyl-L-lysine
  MOD_RES 6: note = L-penicillamine
  MOD_RES 7: note (S)-4-(4-(1-(4-(2-amino-2-carboxyethyl)phenyl)-1H-1,2,3-tri azol-4-yl)butyl)-4-methylmorpholin-4-ium
  MOD_RES 8: note = 3-(2-naphthyl)-L-alanine
  MOD_RES 9: note = 4-aminotetrahydro-2H-pyran-4-carboxylic acid
  MOD_RES 10: note = N6-acetyl-N6-methyl-L-lysine
  MOD_RES 12: note = 3-(3-Pyridyl)-L-alanine
  MOD_RES 13: note = MeGly
  SITE 13: note = C-terminal N,N-dimethylamidyl
XNTWXXXXXXNXX

SEQ ID NO: 337 - protein, 13 aa, synthetic construct
  SITE 1: note = N-terminal N,N,N-trimethyl-2-(2-(3-carbonylpropoxy)ethoxy)ethan-1-amin ium
  MOD_RES 1: note = L-penicillamine
  MOD_RES 2: note = N4,N4-dimethyl-L-asparagine
  MOD_RES 4: note = 7-methyl-L-tryptophan
  MOD_RES 5: note = N6-acetyl-N6-methyl-L-lysine
  MOD_RES 6: note = L-penicillamine
  MOD_RES 7: note (S)-4-(1-(4-(2-amino-2-carboxyethyl)phenyl)-1H-1,2,3-triazo l-4-yl)-N-(2-methoxyethyl)-N,N-dimethylbutan-1-aminium
  MOD_RES 8: note = 3-(2-naphthyl)-L-alanine
  MOD_RES 9: note = 4-aminotetrahydro-2H-pyran-4-carboxylic acid
  MOD_RES 10: note = N6-acetyl-N6-methyl-L-lysine
  MOD_RES 12: note = 3-(3-Pyridyl)-L-alanine
  MOD_RES 13: note = MeGly
  SITE 13: note = C-terminal N,N-dimethylamidyl
XNTWXXXXXXNXX

SEQ ID NO: 338 - protein, 13 aa, synthetic construct
  SITE 1: note = N-terminal N,N,N-trimethyl-2-(2-(3-carbonylpropoxy)ethoxy)ethan-1-amin ium
  MOD_RES 1: note = L-penicillamine
  MOD_RES 2: note = N4,N4-dimethyl-L-asparagine
  MOD_RES 4: note = 7-methyl-L-tryptophan
  MOD_RES 5: note = N6-acetyl-N6-methyl-L-lysine
  MOD_RES 6: note = L-penicillamine
  MOD_RES 7: note (S)-5-(4-(2-amino-2-carboxyethyl)phenoxy)-2,2,3,3,4,4-hexaf luoro-N,N,N-trimethylpentan-1-aminium
  MOD_RES 8: note = 3-(2-naphthyl)-L-alanine
  MOD_RES 9: note = 4-aminotetrahydro-2H-pyran-4-carboxylic acid
  MOD_RES 10: note = N6-acetyl-N6-methyl-L-lysine
  MOD_RES 12: note = 3-(3-Pyridyl)-L-alanine
  MOD_RES 13: note = MeGly
  SITE 13: note = C-terminal N,N-dimethylamidyl
XNTWXXXXXXNXX

SEQ ID NO: 339 - protein, 13 aa, synthetic construct
  SITE 1: note = N-terminal N,N,N-trimethyl-2-(2-(3-carbonylpropoxy)ethoxy)ethan-1-amin ium
  MOD_RES 1: note = L-penicillamine
  MOD_RES 2: note = N4,N4-dimethyl-L-asparagine
  MOD_RES 4: note = 7-methyl-L-tryptophan
  MOD_RES 5: note = N6-acetyl-N6-methyl-L-lysine
  MOD_RES 6: note = L-penicillamine
  MOD_RES 7: note (S)-5-(4-(2-amino-2-carboxyethyl)phenoxy)-N,N,N-trimethylpe ntan-1-aminium
  MOD_RES 8: note = 3-(2-naphthyl)-L-alanine
  MOD_RES 9: note = 1-aminocyclohexane-1-carboxylic acid
  MOD_RES 10: note = N6-acetyl-N6-methyl-L-lysine
  MOD_RES 12: note = 3-(3-Pyridyl)-L-alanine
  MOD_RES 13: note = MeGly
  SITE 13: note = C-terminal N,N-dimethylamidyl
XNTWXXXXXXNXX

SEQ ID NO: 340 - protein, 13 aa, synthetic construct
  SITE 1: note = N-terminal N,N,N-trimethyl-2-(2-(3-carbonylpropoxy)ethoxy)ethan-1-amin ium
  MOD_RES 1: note = L-penicillamine
  MOD_RES 2: note = N4,N4-dimethyl-L-asparagine
  MOD_RES 4: note = 7-methyl-L-tryptophan
  MOD_RES 5: note = N6-acetyl-N6-methyl-L-lysine
  MOD_RES 6: note = L-penicillamine
  MOD_RES 7: note (S)-5-(4-(2-amino-2-carboxyethyl)phenoxy)-N,N,N-trimethylpe ntan-1-aminium
  MOD_RES 8: note = 3-(2-naphthyl)-L-alanine
  MOD_RES 9: note = (S)-2-amino-2-cyclohexylacetic acid
  MOD_RES 10: note = N6-acetyl-N6-methyl-L-lysine
  MOD_RES 12: note = 3-(3-Pyridyl)-L-alanine
  MOD_RES 13: note = MeGly
  SITE 13: note = C-terminal N,N-dimethylamidyl
XNTWXXXXXXNXX

SEQ ID NO: 341 - protein, 13 aa, synthetic construct
  SITE 1: note = N-terminal N,N,N-trimethyl-2-(2-(3-carbonylpropoxy)ethoxy)ethan-1-amin ium
  MOD_RES 1: note = L-penicillamine
  MOD_RES 2: note = N4,N4-dimethyl-L-asparagine
  MOD_RES 4: note = 7-methyl-L-tryptophan
  MOD_RES 5: note = N6-acetyl-N6-methyl-L-lysine
  MOD_RES 6: note = L-penicillamine
  MOD_RES 7: note (S)-5-(4-(2-amino-2-carboxyethyl)phenoxy)-N,N,N-trimethylpe ntan-1-aminium
  MOD_RES 8: note = 3-(2-naphthyl)-L-alanine
  MOD_RES 9: note = Aib
  MOD_RES 10: note = N6-acetyl-N6-methyl-L-lysine
  MOD_RES 12: note = 3-(3-Pyridyl)-L-alanine
  MOD_RES 13: note = MeGly
  SITE 13: note = C-terminal N,N-dimethylamidyl
XNTWXXXXXXNXX

SEQ ID NO: 342 - protein, 13 aa, synthetic construct
  SITE 1: note = N-terminal N,N,N-trimethyl-2-(2-(3-carbonylpropoxy)ethoxy)ethan-1-amin ium
  MOD_RES 1: note = L-penicillamine
  MOD_RES 2: note = (R)-5-amino-5-carboxy-N,N,N-trimethylpentan-1-aminium
  MOD_RES 4: note = 7-methyl-L-tryptophan
  MOD_RES 5: note = N6-acetyl-N6-methyl-L-lysine
  MOD_RES 6: note = L-penicillamine
  MOD_RES 7: note (S)-5-(4-(2-amino-2-carboxyethyl)phenoxy)-N,N,N-trimethylpe ntan-1-aminium
  MOD_RES 8: note = 3-(2-naphthyl)-L-alanine
  MOD_RES 9: note = 1-aminocyclohexane-1-carboxylic acid
  MOD_RES 10: note = N6-acetyl-N6-methyl-L-lysine
  MOD_RES 12: note = 3-(3-Pyridyl)-L-alanine
  MOD_RES 13: note = MeGly
  SITE 13: note = C-terminal N,N-dimethylamidyl
XKTWXXXXXXNXX

SEQ ID NO: 343 - protein, 13 aa, synthetic construct
  SITE 1: note = N-terminal (6-(trimethylammonio)hexanoyl)amidyl
  MOD_RES 1: note = L-penicillamine
  MOD_RES 2: note = N4,N4-dimethyl-L-asparagine
  MOD_RES 4: note = 7-methyl-L-tryptophan
  MOD_RES 5: note = N6-acetyl-N6-methyl-L-lysine
  MOD_RES 6: note = L-penicillamine
  MOD_RES 7: note (S)-5-(4-(2-amino-2-carboxyethyl)phenoxy)-N,N,N-trimethylpe ntan-1-aminium
  MOD_RES 8: note = 3-(2-naphthyl)-L-alanine
  MOD_RES 9: note = 4-aminotetrahydro-2H-pyran-4-carboxylic acid
  MOD_RES 10: note = N6-acetyl-N6-methyl-L-lysine
  MOD_RES 12: note = 3-(3-Pyridyl)-L-alanine
  MOD_RES 13: note = MeGly
  SITE 13: note = C-terminal N,N-dimethylamidyl
XNTWXXXXXXNXX

SEQ ID NO: 344 - protein, 14 aa, synthetic construct
  SITE 1: note = N-terminal acetyl
  MOD_RES 1: note = (R)-6-amino-6-carboxy-N,N,N-trimethylhexan-1-aminium
  MOD_RES 2: note = L-penicillamine
  MOD_RES 3: note = N4,N4-dimethyl-L-asparagine
  MOD_RES 5: note = 7-methyl-L-tryptophan
  MOD_RES 6: note = N6-acetyl-N6-methyl-L-lysine
  MOD_RES 7: note = L-penicillamine
  MOD_RES 8: note (S)-5-(4-(2-amino-2-carboxyethyl)phenoxy)-N,N,N-trimethylpe ntan-1-aminium
  MOD_RES 9: note = 3-(2-naphthyl)-L-alanine
  MOD_RES 10: note = 4-aminotetrahydro-2H-pyran-4-carboxylic acid
  MOD_RES 11: note = N6-acetyl-N6-methyl-L-lysine
  MOD_RES 13: note = 3-(3-Pyridyl)-L-alanine
  MOD_RES 14: note = MeGly
  SITE 14: note = C-terminal N,N-dimethylamidyl
KXNTWXXXXXXNXX

SEQ ID NO: 345 - protein, 14 aa, synthetic construct
  SITE 1: note = N-terminal acetyl
  SITE 1: note = D-Arginine
  MOD_RES 2: note = L-penicillamine
  MOD_RES 3: note = N4,N4-dimethyl-L-asparagine
  MOD_RES 5: note = 7-methyl-L-tryptophan
  MOD_RES 6: note = N6-acetyl-N6-methyl-L-lysine
  MOD_RES 7: note = L-penicillamine
  MOD_RES 8: note (S)-5-(4-(2-amino-2-carboxyethyl)phenoxy)-N,N,N-trimethylpe ntan-1-aminium
  MOD_RES 9: note = 3-(2-naphthyl)-L-alanine
  MOD_RES 10: note = 4-aminotetrahydro-2H-pyran-4-carboxylic acid
  MOD_RES 11: note = N6-acetyl-N6-methyl-L-lysine
  MOD_RES 13: note = 3-(3-Pyridyl)-L-alanine
  MOD_RES 14: note = MeGly
  SITE 14: note = C-terminal N,N-dimethylamidyl
RXNTWXXXXXXNXX

SEQ ID NO: 346 - protein, 13 aa, synthetic construct
  SITE 1: note = N-terminal N,N,N-trimethyl-2-(2-(3-carbonylpropoxy)ethoxy)ethan-1-amin ium
  MOD_RES 1: note = L-penicillamine
  MOD_RES 2: note = N4,N4-dimethyl-L-asparagine
  MOD_RES 4: note = 7-methyl-L-tryptophan
  MOD_RES 5: note = (S)-2-amino-5-ureidopentanoic acid
  MOD_RES 6: note = L-penicillamine
  MOD_RES 7: note (S)-5-(4-(2-amino-2-carboxyethyl)phenoxy)-N,N,N-trimethylpe ntan-1-aminium
  MOD_RES 8: note = 3-(2-naphthyl)-L-alanine
  MOD_RES 9: note = 4-aminotetrahydro-2H-pyran-4-carboxylic acid
  MOD_RES 10: note = N6-acetyl-N6-methyl-L-lysine
  MOD_RES 12: note = 3-(3-Pyridyl)-L-alanine
  MOD_RES 13: note = MeGly
  SITE 13: note = C-terminal N,N-dimethylamidyl
XNTWXXXXXXNXX

SEQ ID NO: 347 - protein, 14 aa, synthetic construct
  SITE 1: note = N-terminal N,N,N-trimethyl-2-(2-(3-carbonylpropoxy)ethoxy)ethan-1-amin ium
  MOD_RES 1: note (2S,39S)-39-amino-5,24,33-trioxo-2-pentadecanamido-9,12,15, 18,21,28,31-heptaoxa-6,25,34-triazatetracontanedioic acid
  MOD_RES 2: note = L-penicillamine
  MOD_RES 3: note = N4,N4-dimethyl-L-asparagine
  MOD_RES 5: note = 7-methyl-L-tryptophan
  MOD_RES 6: note = N6-acetyl-L-lysine
  MOD_RES 7: note = L-penicillamine
  MOD_RES 8: note (S)-5-(4-(2-amino-2-carboxyethyl)phenoxy)-N,N,N-trimethylpe ntan-1-aminium
  MOD_RES 9: note = 3-(2-naphthyl)-L-alanine
  MOD_RES 10: note = 4-aminotetrahydro-2H-pyran-4-carboxylic acid
  MOD_RES 11: note = N6-acetyl-N6-methyl-L-lysine
  MOD_RES 13: note = 3-(3-Pyridyl)-L-alanine
  MOD_RES 14: note (2S,29S)-29-(methylamino)-5,14,23-trioxo-2-palmitamido-9,12 ,18,21-tetraoxa-6,15,24-triazatriacontanedioic acid
  SITE 14: note = C-terminal amidyl
XXNTWKXXXXXNXX

SEQ ID NO: 348 - protein, 14 aa, synthetic construct
  SITE 1: note = N-terminal N,N,N-trimethyl-2-(2-(3-carbonylpropoxy)ethoxy)ethan-1-amin ium
  MOD_RES 1: note (2S,39S)-39-amino-5,24,33-trioxo-2-tridecanamido-9,12,15,18 ,21,28,31-heptaoxa-6,25,34-triazatetracontanedioic acid
  MOD_RES 2: note = L-penicillamine
  MOD_RES 3: note = N4,N4-dimethyl-L-asparagine
  MOD_RES 5: note = 7-methyl-L-tryptophan
  MOD_RES 6: note = N6-acetyl-L-lysine
  MOD_RES 7: note = L-penicillamine
  MOD_RES 8: note (S)-5-(4-(2-amino-2-carboxyethyl)phenoxy)-N,N,N-trimethylpe ntan-1-aminium
  MOD_RES 9: note = 3-(2-naphthyl)-L-alanine
  MOD_RES 10: note = 4-aminotetrahydro-2H-pyran-4-carboxylic acid
  MOD_RES 11: note = N6-acetyl-N6-methyl-L-lysine
  MOD_RES 13: note = 3-(3-Pyridyl)-L-alanine
  MOD_RES 14: note (2S,29S)-29-(methylamino)-5,14,23-trioxo-2-tetradecanamido- 9,12,18,21-tetraoxa-6,15,24-triazatriacontanedioic acid
  SITE 14: note = C-terminal amidyl
XXNTWKXXXXXNXX

SEQ ID NO: 349 - protein, 13 aa, synthetic construct
  SITE 1: note = N-terminal N,N,N-trimethyl-2-(2-(3-carbonylpropoxy)ethoxy)ethan-1-amin ium
  MOD_RES 1: note = L-penicillamine
  MOD_RES 4: note = 7-methyl-L-tryptophan
  MOD_RES 5: note = N6-acetyl-L-lysine
  MOD_RES 6: note = L-penicillamine
  MOD_RES 7: note (S)-5-(4-(2-amino-2-carboxyethyl)phenoxy)-N,N,N-trimethylpe ntan-1-aminium
  MOD_RES 8: note = 3-(2-naphthyl)-L-alanine
  MOD_RES 9: note = 4-aminotetrahydro-2H-pyran-4-carboxylic acid
  MOD_RES 10: note (2S,39S)-39-amino-5,24,33-trioxo-2-tridecanamido-9,12,15,18 ,21,28,31-heptaoxa-6,25,34-triazatetracontanedioic acid
  MOD_RES 12: note = 3-(3-Pyridyl)-L-alanine
  MOD_RES 13: note (2S,29S)-29-(methylamino)-5,14,23-trioxo-2-tetradecanamido- 9,12,18,21-tetraoxa-6,15,24-triazatriacontanedioic acid
  SITE 13: note = C-terminal amidyl
XNTWKXXXXXNXX

SEQ ID NO: 350 - protein, 13 aa, synthetic construct
  SITE 1: note = N-terminal PEG side chain
  MOD_RES 1: note = L-penicillamine
  MOD_RES 2: note = N4,N4-dimethyl-L-asparagine
  MOD_RES 4: note = 7-methyl-L-tryptophan
  MOD_RES 5: note = N6-acetyl-L-lysine
  MOD_RES 6: note = L-penicillamine
  MOD_RES 7: note (S)-5-(4-(2-amino-2-carboxyethyl)phenoxy)-N,N,N-trimethylpe ntan-1-aminium
  MOD_RES 8: note = 3-(2-naphthyl)-L-alanine
  MOD_RES 9: note = 4-aminotetrahydro-2H-pyran-4-carboxylic acid
  MOD_RES 10: note = N6-acetyl-N6-methyl-L-lysine
  MOD_RES 12: note = 3-(3-Pyridyl)-L-alanine
  MOD_RES 13: note (2S,29S)-29-(methylamino)-5,14,23-trioxo-2-palmitamido-9,12 ,18,21-tetraoxa-6,15,24-triazatriacontanedioic acid
  SITE 13: note = C-terminal amidyl
XNTWKXXXXXNXX

SEQ ID NO: 351 - protein, 13 aa, synthetic construct
  SITE 1: note = N-terminal N,N,N-trimethyl-2-(2-(3-carbonylpropoxy)ethoxy)ethan-1-amin ium
  MOD_RES 1: note = L-penicillamine
  MOD_RES 2: note = N4,N4-dimethyl-L-asparagine
  MOD_RES 4: note = 7-methyl-L-tryptophan
  MOD_RES 5: note = N6-acetyl-L-lysine
  MOD_RES 6: note = L-penicillamine
  MOD_RES 7: note (S)-5-(4-(2-amino-2-carboxyethyl)phenoxy)-N,N,N-trimethylpe ntan-1-aminium
  MOD_RES 8: note = 3-(2-naphthyl)-L-alanine
  MOD_RES 9: note = 4-aminotetrahydro-2H-pyran-4-carboxylic acid
  MOD_RES 10: note (2S,39S)-39-amino-5,24,33-trioxo-2-pentadecanamido-9,12,15, 18,21,28,31-heptaoxa-6,25,34-triazatetracontanedioic acid
  MOD_RES 12: note = 3-(3-Pyridyl)-L-alanine
  MOD_RES 13: note (2S,29S)-29-(methylamino)-5,14,23-trioxo-2-palmitamido-9,12 ,18,21-tetraoxa-6,15,24-triazatriacontanedioic acid
  SITE 13: note = C-terminal amidyl
XNTWKXXXXXNXX

SEQ ID NO: 352 - protein, 13 aa, synthetic construct
  SITE 1: note = N-terminal N,N,N-trimethyl-2-(2-(3-carbonylpropoxy)ethoxy)ethan-1-amin ium
  MOD_RES 1: note = L-penicillamine
  MOD_RES 2: note = N4,N4-dimethyl-L-asparagine
  MOD_RES 4: note = 7-methyl-L-tryptophan
  MOD_RES 5: note (2S,39S)-39-amino-5,24,33-trioxo-2-tridecanamido-9,12,15,18 ,21,28,31-heptaoxa-6,25,34-triazatetracontanedioic acid
  MOD_RES 6: note = L-penicillamine
  MOD_RES 7: note (S)-5-(4-(2-amino-2-carboxyethyl)phenoxy)-N,N,N-trimethylpe ntan-1-aminium
  MOD_RES 8: note = 3-(2-naphthyl)-L-alanine
  MOD_RES 9: note = 4-aminotetrahydro-2H-pyran-4-carboxylic acid
  MOD_RES 10: note = N6-acetyl-N6-methyl-L-lysine
  MOD_RES 12: note = 3-(3-Pyridyl)-L-alanine
  MOD_RES 13: note (2S,29S)-29-(methylamino)-5,14,23-trioxo-2-tetradecanamido- 9,12,18,21-tetraoxa-6,15,24-triazatriacontanedioic acid
  SITE 13: note = C-terminal amidyl
XNTWXXXXXXNXX

SEQ ID NO: 353 - protein, 13 aa, synthetic construct
  SITE 1: note = N-terminal N,N,N-trimethyl-2-(2-(3-carbonylpropoxy)ethoxy)ethan-1-amin ium
  MOD_RES 1: note = L-penicillamine
  MOD_RES 2: note = N4,N4-dimethyl-L-asparagine
  MOD_RES 4: note = 7-methyl-L-tryptophan
  MOD_RES 5: note = N6-acetyl-L-lysine
  MOD_RES 6: note = L-penicillamine
  MOD_RES 7: note (S)-5-(4-(2-amino-2-carboxyethyl)phenoxy)-N,N,N-trimethylpe ntan-1-aminium
  MOD_RES 8: note = 3-(2-naphthyl)-L-alanine
  MOD_RES 9: note = 4-aminotetrahydro-2H-pyran-4-carboxylic acid
  MOD_RES 10: note (2S,39S)-39-amino-5,24,33-trioxo-2-tridecanamido-9,12,15,18 ,21,28,31-heptaoxa-6,25,34-triazatetracontanedioic acid
  MOD_RES 12: note = 3-(3-Pyridyl)-L-alanine
  MOD_RES 13: note (2S,29S)-29-(methylamino)-5,14,23-trioxo-2-tetradecanamido- 9,12,18,21-tetraoxa-6,15,24-triazatriacontanedioic acid
  SITE 13: note = C-terminal amidyl
XNTWKXXXXXNXX

SEQ ID NO: 354 - protein, 13 aa, synthetic construct
  SITE 1: note = N-terminal PEG side chain
  MOD_RES 1: note = L-penicillamine
  MOD_RES 2: note = N4,N4-dimethyl-L-asparagine
  MOD_RES 4: note = 7-methyl-L-tryptophan
  MOD_RES 5: note = N6-acetyl-L-lysine
  MOD_RES 6: note = L-penicillamine
  MOD_RES 7: note (S)-5-(4-(2-amino-2-carboxyethyl)phenoxy)-N,N,N-trimethylpe ntan-1-aminium
  MOD_RES 8: note = 3-(2-naphthyl)-L-alanine
  MOD_RES 9: note = 4-aminotetrahydro-2H-pyran-4-carboxylic acid
  MOD_RES 10: note = N6-acetyl-N6-methyl-L-lysine
  MOD_RES 12: note = 3-(3-Pyridyl)-L-alanine
  MOD_RES 13: note (2S,29S)-29-(methylamino)-5,14,23-trioxo-2-tetradecanamido- 9,12,18,21-tetraoxa-6,15,24-triazatriacontanedioic acid
  SITE 13: note = C-terminal amidyl
XNTWKXXXXXNXX

SEQ ID NO: 355 - protein, 13 aa, synthetic construct
  SITE 1: note = N-terminal N,N,N-trimethyl-2-(2-(3-carbonylpropoxy)ethoxy)ethan-1-amin ium
  MOD_RES 1: note = L-penicillamine
  MOD_RES 2: note = N4,N4-dimethyl-L-asparagine
  MOD_RES 4: note = 7-methyl-L-tryptophan
  MOD_RES 5: note (2S,39S)-39-amino-5,24,33-trioxo-2-pentadecanamido-9,12,15, 18,21,28,31-heptaoxa-6,25,34-triazatetracontanedioic acid
  MOD_RES 6: note = L-penicillamine
  MOD_RES 7: note (S)-5-(4-(2-amino-2-carboxyethyl)phenoxy)-N,N,N-trimethylpe ntan-1-aminium
  MOD_RES 8: note = 3-(2-naphthyl)-L-alanine
  MOD_RES 9: note = 4-aminotetrahydro-2H-pyran-4-carboxylic acid
  MOD_RES 10: note = N6-acetyl-N6-methyl-L-lysine
  MOD_RES 12: note = 3-(3-Pyridyl)-L-alanine
  MOD_RES 13: note (2S,29S)-29-(methylamino)-5,14,23-trioxo-2-palmitamido-9,12 ,18,21-tetraoxa-6,15,24-triazatriacontanedioic acid
  SITE 13: note = C-terminal amidyl
XNTWXXXXXXNXX

SEQ ID NO: 356 - protein, 13 aa, synthetic construct
  SITE 1: note = N-terminal N,N,N-trimethyl-2-(2-(3-carbonylpropoxy)ethoxy)ethan-1-amin ium
  MOD_RES 1: note = L-penicillamine
  MOD_RES 2: note (2S,39S)-39-amino-5,24,33-trioxo-2-tridecanamido-9,12,15,18 ,21,28,31-heptaoxa-6,25,34-triazatetracontanedioic acid
  MOD_RES 4: note = 7-methyl-L-tryptophan
  MOD_RES 5: note = N6-acetyl-L-lysine
  MOD_RES 6: note = L-penicillamine
  MOD_RES 7: note (S)-5-(4-(2-amino-2-carboxyethyl)phenoxy)-N,N,N-trimethylpe ntan-1-aminium
  MOD_RES 8: note = 3-(2-naphthyl)-L-alanine
  MOD_RES 9: note = 4-aminotetrahydro-2H-pyran-4-carboxylic acid
  MOD_RES 10: note = N6-acetyl-N6-methyl-L-lysine
  MOD_RES 12: note = 3-(3-Pyridyl)-L-alanine
  MOD_RES 13: note (2S,29S)-29-(methylamino)-5,14,23-trioxo-2-tetradecanamido- 9,12,18,21-tetraoxa-6,15,24-triazatriacontanedioic acid
  SITE 13: note = C-terminal amidyl
XXTWKXXXXXNXX

SEQ ID NO: 357 - protein, 13 aa, synthetic construct
  SITE 1: note = N-terminal N,N,N-trimethyl-2-(2-(3-carbonylpropoxy)ethoxy)ethan-1-amin ium
  MOD_RES 1: note = L-penicillamine
  MOD_RES 2: note (2S,39S)-39-amino-5,24,33-trioxo-2-pentadecanamido-9,12,15, 18,21,28,31-heptaoxa-6,25,34-triazatetracontanedioic acid
  MOD_RES 4: note = 7-methyl-L-tryptophan
  MOD_RES 5: note = N6-acetyl-L-lysine
  MOD_RES 6: note = L-penicillamine
  MOD_RES 7: note (S)-5-(4-(2-amino-2-carboxyethyl)phenoxy)-N,N,N-trimethylpe ntan-1-aminium
  MOD_RES 8: note = 3-(2-naphthyl)-L-alanine
  MOD_RES 9: note = 4-aminotetrahydro-2H-pyran-4-carboxylic acid
  MOD_RES 10: note = N6-acetyl-N6-methyl-L-lysine
  MOD_RES 12: note = 3-(3-Pyridyl)-L-alanine
  MOD_RES 13: note (2S,29S)-29-(methylamino)-5,14,23-trioxo-2-palmitamido-9,12 ,18,21-tetraoxa-6,15,24-triazatriacontanedioic acid
  SITE 13: note = C-terminal amidyl
XXTWKXXXXXNXX

SEQ ID NO: 358 - protein, 13 aa, synthetic construct
  SITE 1: note = N-terminal N,N,N-trimethyl-2-(2-(3-carbonylpropoxy)ethoxy)ethan-1-amin ium
  MOD_RES 1: note = L-penicillamine
  MOD_RES 2: note = N4,N4-dimethyl-L-asparagine
  MOD_RES 4: note = 7-methyl-L-tryptophan
  MOD_RES 5: note = (S)-2-amino-4-(N-methylacetamido)butanoic acid
  MOD_RES 6: note = L-penicillamine
  MOD_RES 7: note (S)-5-(4-(2-amino-2-carboxyethyl)phenoxy)-N,N,N-trimethylpe ntan-1-aminium
  MOD_RES 8: note = 3-(2-naphthyl)-L-alanine
  MOD_RES 9: note = 4-aminotetrahydro-2H-pyran-4-carboxylic acid
  MOD_RES 10: note = N6-acetyl-N6-methyl-L-lysine
  MOD_RES 12: note = 3-(3-Pyridyl)-L-alanine
  MOD_RES 13: note = MeGly
  SITE 13: note = C-terminal N,N-dimethylamidyl
XNTWXXXXXXNXX

SEQ ID NO: 359 - protein, 13 aa, synthetic construct
  SITE 1: note = N-terminal N,N,N-trimethyl-2-(2-(3-carbonylpropoxy)ethoxy)ethan-1-amin ium
  MOD_RES 1: note = L-penicillamine
  MOD_RES 2: note = N4,N4-dimethyl-L-asparagine
  MOD_RES 4: note = 7-methyl-L-tryptophan
  MOD_RES 5: note = N6-acetyl-L-lysine
  MOD_RES 6: note = L-penicillamine
  MOD_RES 7: note (S)-5-(4-(2-amino-2-carboxyethyl)phenoxy)-N,N,N-trimethylpe ntan-1-aminium
  MOD_RES 8: note = 3-(2-naphthyl)-L-alanine
  MOD_RES 9: note = 4-aminotetrahydro-2H-pyran-4-carboxylic acid
  MOD_RES 10: note = N6-acetyl-N6-methyl-L-lysine
  MOD_RES 12: note = 3-(3-Pyridyl)-L-alanine
  MOD_RES 13: note (S)-2-(methylamino)-8,17,26-trioxo-10,13,19,22-tetraoxa-7,1 6,25-triazanonatriacontanoic acid
  SITE 13: note = C-terminal amidyl
XNTWKXXXXXNXX

SEQ ID NO: 360 - protein, 13 aa, synthetic construct
  SITE 1: note = N-terminal N,N,N-trimethyl-2-(2-(3-carbonylpropoxy)ethoxy)ethan-1-amin ium
  MOD_RES 1: note = L-penicillamine
  MOD_RES 2: note = N4,N4-dimethyl-L-asparagine
  MOD_RES 4: note = 7-methyl-L-tryptophan
  MOD_RES 5: note = N6-acetyl-L-lysine
  MOD_RES 6: note = L-penicillamine
  MOD_RES 7: note (S)-5-(4-(2-amino-2-carboxyethyl)phenoxy)-N,N,N-trimethylpe ntan-1-aminium
  MOD_RES 8: note = 3-(2-naphthyl)-L-alanine
  MOD_RES 9: note = 4-aminotetrahydro-2H-pyran-4-carboxylic acid
  MOD_RES 10: note = N6-acetyl-N6-methyl-L-lysine
  MOD_RES 12: note = 3-(3-Pyridyl)-L-alanine
  MOD_RES 13: note = Modified N-methyl-L-lysine with PEG-ylated side chain
  SITE 13: note = C-terminal amidyl
XNTWKXXXXXNXX

SEQ ID NO: 361 - protein, 13 aa, synthetic construct
  SITE 1: note = N-terminal N,N,N-trimethyl-2-(2-(3-carbonylpropoxy)ethoxy)ethan-1-amin ium
  MOD_RES 1: note = L-penicillamine
  MOD_RES 2: note = N4,N4-dimethyl-L-asparagine
  MOD_RES 4: note = 7-methyl-L-tryptophan
  MOD_RES 5: note = N6-acetyl-L-lysine
  MOD_RES 6: note = L-penicillamine
  MOD_RES 7: note (S)-5-(4-(2-amino-2-carboxyethyl)phenoxy)-N,N,N-trimethylpe ntan-1-aminium
  MOD_RES 8: note = 3-(2-naphthyl)-L-alanine
  MOD_RES 9: note = 4-aminotetrahydro-2H-pyran-4-carboxylic acid
  MOD_RES 10: note = N6-acetyl-N6-methyl-L-lysine
  MOD_RES 12: note = 3-(3-Pyridyl)-L-alanine
  MOD_RES 13: note = Modified N-methyl-L-lysine with PEG-ylated side chain
  SITE 13: note = C-terminal amidyl
XNTWKXXXXXNXX

SEQ ID NO: 362 - protein, 13 aa, synthetic construct
  SITE 1: note = N-terminal N,N,N-trimethyl-2-(2-(3-carbonylpropoxy)ethoxy)ethan-1-amin ium
  MOD_RES 1: note = L-penicillamine
  MOD_RES 2: note = N4,N4-dimethyl-L-asparagine
  MOD_RES 4: note = 7-methyl-L-tryptophan
  MOD_RES 5: note = (S)-2-amino-4-(N-methylacetamido)butanoic acid
  MOD_RES 6: note = L-penicillamine
  MOD_RES 7: note (S)-5-(4-(2-amino-2-carboxyethyl)phenoxy)-N,N,N-trimethylpe ntan-1-aminium
  MOD_RES 8: note = 3-(2-naphthyl)-L-alanine
  MOD_RES 9: note = 4-aminotetrahydro-2H-pyran-4-carboxylic acid
  MOD_RES 10: note = N6-acetyl-N6-methyl-L-lysine
  MOD_RES 12: note = 3-(3-Pyridyl)-L-alanine
  MOD_RES 13: note = MeGly
  SITE 13: note = C-terminal amidyl
XNTWXXXXXXNXX

SEQ ID NO: 363 - protein, 13 aa, synthetic construct
  SITE 1: note = N-terminal N,N,N-trimethyl-2-(2-(3-carbonylpropoxy)ethoxy)ethan-1-amin ium
  MOD_RES 1: note = L-penicillamine
  MOD_RES 2: note = N4,N4-dimethyl-L-asparagine
  MOD_RES 4: note = 7-methyl-L-tryptophan
  MOD_RES 5: note = N6-acetyl-N6-methyl-L-lysine
  MOD_RES 6: note = L-penicillamine
  MOD_RES 7: note (S)-2-(2-(2-(4-(2-amino-2-carboxyethyl)phenoxy)ethoxy)ethox y)-N,N,N-trimethylethan-1-aminium
  MOD_RES 8: note = 3-(2-naphthyl)-L-alanine
  MOD_RES 9: note = 4-aminotetrahydro-2H-pyran-4-carboxylic acid
  MOD_RES 10: note = N6-acetyl-N6-methyl-L-lysine
  MOD_RES 12: note = 3-(3-Pyridyl)-L-alanine
  MOD_RES 13: note = MeGly
  SITE 13: note = C-terminal amidyl
XNTWXXXXXXNXX

SEQ ID NO: 364 - protein, 13 aa, synthetic construct
  SITE 1: note = N-terminal N,N,N-trimethyl-2-(2-(3-carbonylpropoxy)ethoxy)ethan-1-amin ium
  MOD_RES 1: note = L-penicillamine
  MOD_RES 2: note (S)-2-(2-(2-amino-2-carboxyethoxy)ethoxy)-N,N,N-trimethylet han-1-aminium
  MOD_RES 4: note = 7-methyl-L-tryptophan
  MOD_RES 5: note = N6-acetyl-N6-methyl-L-lysine
  MOD_RES 6: note = L-penicillamine
  MOD_RES 7: note (S)-2-(2-(2-(4-(2-amino-2-carboxyethyl)phenoxy)ethoxy)ethox y)-N,N,N-trimethylethan-1-aminium
  MOD_RES 8: note = 3-(2-naphthyl)-L-alanine
  MOD_RES 9: note = 4-aminotetrahydro-2H-pyran-4-carboxylic acid
  MOD_RES 10: note = N6-acetyl-N6-methyl-L-lysine
  MOD_RES 12: note = 3-(3-Pyridyl)-L-alanine
  MOD_RES 13: note = MeGly
  SITE 13: note = C-terminal N,N-dimethylamidyl
XXTWKXXXXKNXX

SEQ ID NO: 365 - protein, 13 aa, synthetic construct
  SITE 1: note = N-terminal acetyl
  MOD_RES 1: note = L-penicillamine
  MOD_RES 2: note (S)-2-(2-(2-amino-2-carboxyethoxy)ethoxy)-N,N,N-trimethylet han-1-aminium
  MOD_RES 4: note = 7-methyl-L-tryptophan
  MOD_RES 5: note = N6-acetyl-N6-methyl-L-lysine
  MOD_RES 6: note = L-penicillamine
  MOD_RES 7: note (S)-2-(2-(2-(4-(2-amino-2-carboxyethyl)phenoxy)ethoxy)ethox y)-N,N,N-trimethylethan-1-aminium
  MOD_RES 8: note = 3-(2-naphthyl)-L-alanine
  MOD_RES 9: note = 4-aminotetrahydro-2H-pyran-4-carboxylic acid
  MOD_RES 10: note = N6-acetyl-N6-methyl-L-lysine
  MOD_RES 12: note = 3-(3-Pyridyl)-L-alanine
  MOD_RES 13: note = MeGly
  SITE 13: note = C-terminal N,N-dimethylamidyl
XXTWKXXXXKNXX

SEQ ID NO: 366 - protein, 14 aa, synthetic construct
  SITE 1: note = N-terminal PEG side chain
  MOD_RES 1: note (S)-2-(2-(2-amino-2-carboxyethoxy)ethoxy)-N,N,N-trimethylet han-1-aminium
  MOD_RES 2: note = L-penicillamine
  MOD_RES 3: note = N4,N4-dimethyl-L-asparagine
  MOD_RES 5: note = 7-methyl-L-tryptophan
  MOD_RES 6: note = N6-acetyl-N6-methyl-L-lysine
  MOD_RES 7: note = L-penicillamine
  MOD_RES 8: note (S)-2-(2-(2-(4-(2-amino-2-carboxyethyl)phenoxy)ethoxy)ethox y)-N,N,N-trimethylethan-1-aminium
  MOD_RES 9: note = 3-(2-naphthyl)-L-alanine
  MOD_RES 10: note = 4-aminotetrahydro-2H-pyran-4-carboxylic acid
  MOD_RES 11: note = N6-acetyl-N6-methyl-L-lysine
  MOD_RES 13: note = 3-(3-Pyridyl)-L-alanine
  MOD_RES 14: note = MeGly
  SITE 14: note = C-terminal N,N-dimethylamidyl
XXNTWXXXXXXNXX

SEQ ID NO: 367 - protein, 14 aa, synthetic construct
  SITE 1: note = N-terminal PEG side chain
  MOD_RES 1: note (S)-2-(2-(2-amino-2-carboxyethoxy)ethoxy)-N,N,N-trimethylet han-1-aminium
  MOD_RES 2: note = L-penicillamine
  MOD_RES 3: note = N4,N4-dimethyl-L-asparagine
  MOD_RES 5: note = 7-methyl-L-tryptophan
  MOD_RES 6: note = N6-acetyl-N6-methyl-L-lysine
  MOD_RES 7: note = L-penicillamine
  MOD_RES 8: note (S)-2-(2-(2-(4-(2-amino-2-carboxyethyl)phenoxy)ethoxy)ethox y)-N,N,N-trimethylethan-1-aminium
  MOD_RES 9: note = 3-(2-naphthyl)-L-alanine
  MOD_RES 10: note = 4-aminotetrahydro-2H-pyran-4-carboxylic acid
  MOD_RES 11: note = N6-acetyl-N6-methyl-L-lysine
  MOD_RES 13: note = 3-(3-Pyridyl)-L-alanine
  MOD_RES 14: note = MeGly
  SITE 14: note = C-terminal N,N-dimethylamidyl
XXNTWXXXXXXNXX

SEQ ID NO: 368 - protein, 14 aa, synthetic construct
  SITE 1: note = N-terminal PEG side chain
  MOD_RES 1: note (S)-2-(2-(2-amino-2-carboxyethoxy)ethoxy)-N,N,N-trimethylet han-1-aminium
  MOD_RES 2: note = L-penicillamine
  MOD_RES 3: note = N4,N4-dimethyl-L-asparagine
  MOD_RES 5: note = 7-methyl-L-tryptophan
  MOD_RES 6: note (2S,39S)-39-amino-5,24,33-trioxo-2-tridecanamido-9,12,15,18 ,21,28,31-heptaoxa-6,25,34-triazatetracontanedioic acid
  MOD_RES 7: note = L-penicillamine
  MOD_RES 8: note (S)-2-(2-(2-(4-(2-amino-2-carboxyethyl)phenoxy)ethoxy)ethox y)-N,N,N-trimethylethan-1-aminium
  MOD_RES 9: note = 3-(2-naphthyl)-L-alanine
  MOD_RES 10: note = 4-aminotetrahydro-2H-pyran-4-carboxylic acid
  MOD_RES 11: note = N6-acetyl-N6-methyl-L-lysine
  MOD_RES 13: note = 3-(3-Pyridyl)-L-alanine
  MOD_RES 14: note = MeGly
  SITE 14: note = C-terminal N,N-dimethylamidyl
XXNTWXXXXXXNXX

SEQ ID NO: 369 - protein, 14 aa, synthetic construct
  SITE 1: note = N-terminal PEG side chain
  MOD_RES 1: note (S)-2-(2-(2-amino-2-carboxyethoxy)ethoxy)-N,N,N-trimethylet han-1-aminium
  MOD_RES 2: note = L-penicillamine
  MOD_RES 3: note = N4,N4-dimethyl-L-asparagine
  MOD_RES 5: note = 7-methyl-L-tryptophan
  MOD_RES 6: note (2S,39S)-39-amino-5,24,33-trioxo-2-pentadecanamido-9,12,15, 18,21,28,31-heptaoxa-6,25,34-triazatetracontanedioic acid
  MOD_RES 7: note = L-penicillamine
  MOD_RES 8: note (S)-2-(2-(2-(4-(2-amino-2-carboxyethyl)phenoxy)ethoxy)ethox y)-N,N,N-trimethylethan-1-aminium
  MOD_RES 9: note = 3-(2-naphthyl)-L-alanine
  MOD_RES 10: note = 4-aminotetrahydro-2H-pyran-4-carboxylic acid
  MOD_RES 11: note = N6-acetyl-N6-methyl-L-lysine
  MOD_RES 13: note = 3-(3-Pyridyl)-L-alanine
  MOD_RES 14: note = MeGly
  SITE 14: note = C-terminal N,N-dimethylamidyl
XXNTWXXXXXXNXX

SEQ ID NO: 370 - protein, 14 aa, synthetic construct
  SITE 1: note = N-terminal N,N,N-trimethyl-2-(2-(3-carbonylpropoxy)ethoxy)ethan-1-amin ium
  MOD_RES 1: note (2S,39S)-39-amino-2-dodecanamido-5,24,33-trioxo-9,12,15,18, 21,28,31-heptaoxa-6,25,34-triazatetracontanedioic acid
  MOD_RES 2: note = L-penicillamine
  MOD_RES 3: note = N4,N4-dimethyl-L-asparagine
  MOD_RES 5: note = 7-methyl-L-tryptophan
  MOD_RES 6: note = N6-acetyl-L-lysine
  MOD_RES 7: note = L-penicillamine
  MOD_RES 8: note (S)-5-(4-(2-amino-2-carboxyethyl)phenoxy)-N,N,N-trimethylpe ntan-1-aminium
  MOD_RES 9: note = 3-(2-naphthyl)-L-alanine
  MOD_RES 10: note = 4-aminotetrahydro-2H-pyran-4-carboxylic acid
  MOD_RES 11: note = N6-acetyl-N6-methyl-L-lysine
  MOD_RES 13: note = 3-(3-Pyridyl)-L-alanine
  MOD_RES 14: note = Modified N-methyl-L-lysine with PEG-ylated side chain
  SITE 14: note = C-terminal amidyl
XXNTWKXXXXXNXX

SEQ ID NO: 371 - protein, 13 aa, synthetic construct
  SITE 1: note = N-terminal N,N,N-trimethyl-2-(2-(3-carbonylpropoxy)ethoxy)ethan-1-amin ium
  MOD_RES 1: note = L-penicillamine
  MOD_RES 4: note = 7-methyl-L-tryptophan
  MOD_RES 5: note = N6-acetyl-L-lysine
  MOD_RES 6: note = L-penicillamine
  MOD_RES 7: note (S)-5-(4-(2-amino-2-carboxyethyl)phenoxy)-N,N,N-trimethylpe ntan-1-aminium
  MOD_RES 8: note = 3-(2-naphthyl)-L-alanine
  MOD_RES 9: note = 4-aminotetrahydro-2H-pyran-4-carboxylic acid
  MOD_RES 10: note = N6-acetyl-N6-methyl-L-lysine
  MOD_RES 12: note = 3-(3-Pyridyl)-L-alanine
  MOD_RES 13: note (2S,29S)-29-(methylamino)-5,14,23-trioxo-2-tetradecanamido- 9,12,18,21-tetraoxa-6,15,24-triazatriacontanedioic acid
  SITE 13: note = C-terminal amidyl
XNTWKXXXXXNXX

SEQ ID NO: 372 - protein, 13 aa, synthetic construct
  SITE 1: note = N-terminal N,N,N-trimethyl-2-(2-(3-carbonylpropoxy)ethoxy)ethan-1-amin ium
  MOD_RES 1: note = L-penicillamine
  MOD_RES 2: note = N4,N4-dimethyl-L-asparagine
  MOD_RES 4: note = 7-methyl-L-tryptophan
  MOD_RES 5: note = N6-acetyl-L-lysine
  MOD_RES 6: note = L-penicillamine
  MOD_RES 7: note (S)-5-(4-(2-amino-2-carboxyethyl)phenoxy)-N,N,N-trimethylpe ntan-1-aminium
  MOD_RES 8: note = 3-(2-naphthyl)-L-alanine
  MOD_RES 9: note = 4-aminotetrahydro-2H-pyran-4-carboxylic acid
  MOD_RES 10: note = N6-acetyl-N6-methyl-L-lysine
  MOD_RES 12: note = 3-(3-Pyridyl)-L-alanine
  MOD_RES 13: note = Modified N-methyl-L-lysine with PEG-ylated side chain
  SITE 13: note = C-terminal amidyl
XNTWKXXXXXNXX

SEQ ID NO: 373 - protein, 13 aa, synthetic construct
  SITE 1: note = N-terminal N,N,N-trimethyl-2-(2-(3-carbonylpropoxy)ethoxy)ethan-1-amin ium
  MOD_RES 1: note = L-penicillamine
  MOD_RES 2: note = N4,N4-dimethyl-L-asparagine
  MOD_RES 4: note = 7-methyl-L-tryptophan
  MOD_RES 5: note = N6-acetyl-L-lysine
  MOD_RES 6: note = L-penicillamine
  MOD_RES 7: note (S)-5-(4-(2-amino-2-carboxyethyl)phenoxy)-N,N,N-trimethylpe ntan-1-aminium
  MOD_RES 8: note = 3-(2-naphthyl)-L-alanine
  MOD_RES 9: note = 4-aminotetrahydro-2H-pyran-4-carboxylic acid
  MOD_RES 10: note (2S,39S)-39-amino-2-dodecanamido-5,24,33-trioxo-9,12,15,18, 21,28,31-heptaoxa-6,25,34-triazatetracontanedioic acid
  MOD_RES 12: note = 3-(3-Pyridyl)-L-alanine
  MOD_RES 13: note = Modified N-methyl-L-lysine with PEG-ylated side chain
  SITE 13: note = C-terminal amidyl
XNTWKXXXXXNXX

SEQ ID NO: 374 - protein, 14 aa, synthetic construct
  SITE 1: note = N-terminal PEG side chain
  MOD_RES 1: note = (R)-6-amino-6-carboxy-N,N,N-trimethylhexan-1-aminium
  MOD_RES 2: note = L-penicillamine
  MOD_RES 3: note (2S,39S)-39-amino-5,24,33-trioxo-2-pentadecanamido-9,12,15, 18,21,28,31-heptaoxa-6,25,34-triazatetracontanedioic acid
  MOD_RES 5: note = 7-methyl-L-tryptophan
  MOD_RES 6: note = N6-acetyl-N6-methyl-L-lysine
  MOD_RES 7: note = L-penicillamine
  MOD_RES 8: note (S)-5-(4-(2-amino-2-carboxyethyl)phenoxy)-N,N,N-trimethylpe ntan-1-aminium
  MOD_RES 9: note = 3-(2-naphthyl)-L-alanine
  MOD_RES 10: note = 4-aminotetrahydro-2H-pyran-4-carboxylic acid
  MOD_RES 11: note = N6-acetyl-N6-methyl-L-lysine
  MOD_RES 13: note = 3-(3-Pyridyl)-L-alanine
  MOD_RES 14: note = MeGly
  SITE 14: note = C-terminal N,N-dimethylamidyl
KXXTWXXXXXXNXX

SEQ ID NO: 375 - protein, 14 aa, synthetic construct
  SITE 1: note = N-terminal PEG side chain
  MOD_RES 1: note = (R)-6-amino-6-carboxy-N,N,N-trimethylhexan-1-aminium
  MOD_RES 2: note = L-penicillamine
  MOD_RES 3: note = N4,N4-dimethyl-L-asparagine
  MOD_RES 5: note = 7-methyl-L-tryptophan
  MOD_RES 6: note = N6-acetyl-N6-methyl-L-lysine
  MOD_RES 7: note = L-penicillamine
  MOD_RES 8: note (S)-5-(4-(2-amino-2-carboxyethyl)phenoxy)-N,N,N-trimethylpe ntan-1-aminium
  MOD_RES 9: note = 3-(2-naphthyl)-L-alanine
  MOD_RES 10: note = 4-aminotetrahydro-2H-pyran-4-carboxylic acid
  MOD_RES 11: note (2S,39S)-39-amino-5,24,33-trioxo-2-tridecanamido-9,12,15,18 ,21,28,31-heptaoxa-6,25,34-triazatetracontanedioic acid
  MOD_RES 13: note = 3-(3-Pyridyl)-L-alanine
  MOD_RES 14: note = MeGly
  SITE 14: note = C-terminal N,N-dimethylamidyl
KXNTWXXXXXXNXX

SEQ ID NO: 376 - protein, 14 aa, synthetic construct
  SITE 1: note = N-terminal PEG side chain
  MOD_RES 1: note = (R)-6-amino-6-carboxy-N,N,N-trimethylhexan-1-aminium
  MOD_RES 2: note = L-penicillamine
  MOD_RES 3: note = N4,N4-dimethyl-L-asparagine
  MOD_RES 5: note = 7-methyl-L-tryptophan
  MOD_RES 6: note = N6-acetyl-N6-methyl-L-lysine
  MOD_RES 7: note = L-penicillamine
  MOD_RES 8: note (S)-5-(4-(2-amino-2-carboxyethyl)phenoxy)-N,N,N-trimethylpe ntan-1-aminium
  MOD_RES 9: note = 3-(2-naphthyl)-L-alanine
  MOD_RES 10: note = 4-aminotetrahydro-2H-pyran-4-carboxylic acid
  MOD_RES 11: note (2S,39S)-39-amino-5,24,33-trioxo-2-pentadecanamido-9,12,15, 18,21,28,31-heptaoxa-6,25,34-triazatetracontanedioic acid
  MOD_RES 13: note = 3-(3-Pyridyl)-L-alanine
  MOD_RES 14: note = MeGly
  SITE 14: note = C-terminal N,N-dimethylamidyl
KXNTWXXXXXXNXX

SEQ ID NO: 377 - protein, 13 aa, synthetic construct
  SITE 1: note = N-terminal PEG side chain
  MOD_RES 1: note = (R)-6-amino-6-carboxy-N,N,N-trimethylhexan-1-aminium
  MOD_RES 2: note = L-penicillamine
  MOD_RES 3: note = N4,N4-dimethyl-L-asparagine
  MOD_RES 5: note = 7-methyl-L-tryptophan
  MOD_RES 6: note = N6-acetyl-N6-methyl-L-lysine
  MOD_RES 7: note = L-penicillamine
  MOD_RES 8: note (S)-5-(4-(2-amino-2-carboxyethyl)phenoxy)-N,N,N-trimethylpe ntan-1-aminium
  MOD_RES 9: note = 3-(2-naphthyl)-L-alanine
  MOD_RES 10: note (2S,39S)-39-amino-5,24,33-trioxo-2-tridecanamido-9,12,15,18 ,21,28,31-heptaoxa-6,25,34-triazatetracontanedioic acid
  MOD_RES 12: note = 3-(3-Pyridyl)-L-alanine
  MOD_RES 13: note = MeGly
  SITE 12: note = C-terminal N,N-dimethylamidyl
KXNTWXXXXXNXX

SEQ ID NO: 378 - protein, 14 aa, synthetic construct
  SITE 1: note = N-terminal N,N,N-trimethyl-2-(2-(3-carbonylpropoxy)ethoxy)ethan-1-amin ium
  MOD_RES 1: note (2S,39S)-39-amino-5,24,33-trioxo-2-tridecanamido-9,12,15,18 ,21,28,31-heptaoxa-6,25,34-triazatetracontanedioic acid
  MOD_RES 2: note = L-penicillamine
  MOD_RES 3: note = N4,N4-dimethyl-L-asparagine
  MOD_RES 5: note = 7-methyl-L-tryptophan
  MOD_RES 6: note = N6-acetyl-N6-methyl-L-lysine
  MOD_RES 7: note = L-penicillamine
  MOD_RES 8: note (S)-5-(4-(2-amino-2-carboxyethyl)phenoxy)-N,N,N-trimethylpe ntan-1-aminium
  MOD_RES 9: note = 3-(2-naphthyl)-L-alanine
  MOD_RES 10: note = 4-aminotetrahydro-2H-pyran-4-carboxylic acid
  MOD_RES 11: note = N6-acetyl-N6-methyl-L-lysine
  MOD_RES 13: note = 3-(3-Pyridyl)-L-alanine
  MOD_RES 14: note = MeGly
  SITE 14: note = C-terminal N,N-dimethylamidyl
XXNTWXXXXXXNXX

SEQ ID NO: 379 - protein, 14 aa, synthetic construct
  SITE 1: note = N-terminal N,N,N-trimethyl-2-(2-(3-carbonylpropoxy)ethoxy)ethan-1-amin ium
  MOD_RES 1: note (2S,39S)-39-amino-5,24,33-trioxo-2-pentadecanamido-9,12,15, 18,21,28,31-heptaoxa-6,25,34-triazatetracontanedioic acid
  MOD_RES 2: note = L-penicillamine
  MOD_RES 3: note = N4,N4-dimethyl-L-asparagine
  MOD_RES 5: note = 7-methyl-L-tryptophan
  MOD_RES 6: note = N6-acetyl-N6-methyl-L-lysine
  MOD_RES 7: note = L-penicillamine
  MOD_RES 8: note (S)-5-(4-(2-amino-2-carboxyethyl)phenoxy)-N,N,N-trimethylpe ntan-1-aminium
  MOD_RES 9: note = 3-(2-naphthyl)-L-alanine
  MOD_RES 10: note = 4-aminotetrahydro-2H-pyran-4-carboxylic acid
  MOD_RES 11: note = N6-acetyl-N6-methyl-L-lysine
  MOD_RES 13: note = 3-(3-Pyridyl)-L-alanine
  MOD_RES 14: note = MeGly
  SITE 14: note = C-terminal N,N-dimethylamidyl
XXNTWXXXXXXNXX

SEQ ID NO: 380 - protein, 14 aa, synthetic construct
  SITE 1: note = N-terminal N,N,N-trimethyl-2-(2-(3-carbonylpropoxy)ethoxy)ethan-1-amin ium
  MOD_RES 1: note (2S,39S)-39-amino-5,24,33-trioxo-2-tridecanamido-9,12,15,18 ,21,28,31-heptaoxa-6,25,34-triazatetracontanedioic acid
  MOD_RES 2: note = L-penicillamine
  MOD_RES 3: note (2S,39S)-39-amino-5,24,33-trioxo-2-tridecanamido-9,12,15,18 ,21,28,31-heptaoxa-6,25,34-triazatetracontanedioic acid
  MOD_RES 5: note = 7-methyl-L-tryptophan
  MOD_RES 6: note = N6-acetyl-N6-methyl-L-lysine
  MOD_RES 7: note = L-penicillamine
  MOD_RES 8: note (S)-5-(4-(2-amino-2-carboxyethyl)phenoxy)-N,N,N-trimethylpe ntan-1-aminium
  MOD_RES 9: note = 3-(2-naphthyl)-L-alanine
  MOD_RES 10: note = 4-aminotetrahydro-2H-pyran-4-carboxylic acid
  MOD_RES 11: note = N6-acetyl-N6-methyl-L-lysine
  MOD_RES 13: note = 3-(3-Pyridyl)-L-alanine
  MOD_RES 14: note = MeGly
  SITE 14: note = C-terminal N,N-dimethylamidyl
XXXTWKXXXXKNXX

SEQ ID NO: 381 - protein, 14 aa, synthetic construct
  SITE 1: note = N-terminal N,N,N-trimethyl-2-(2-(3-carbonylpropoxy)ethoxy)ethan-1-amin ium
  MOD_RES 1: note (2S,39S)-39-amino-5,24,33-trioxo-2-pentadecanamido-9,12,15, 18,21,28,31-heptaoxa-6,25,34-triazatetracontanedioic acid
  MOD_RES 2: note = L-penicillamine
  MOD_RES 3: note (2S,39S)-39-amino-5,24,33-trioxo-2-pentadecanamido-9,12,15, 18,21,28,31-heptaoxa-6,25,34-triazatetracontanedioic acid
  MOD_RES 5: note = 7-methyl-L-tryptophan
  MOD_RES 6: note = N6-acetyl-N6-methyl-L-lysine
  MOD_RES 7: note = L-penicillamine
  MOD_RES 8: note (S)-5-(4-(2-amino-2-carboxyethyl)phenoxy)-N,N,N-trimethylpe ntan-1-aminium
  MOD_RES 9: note = 3-(2-naphthyl)-L-alanine
  MOD_RES 10: note = 4-aminotetrahydro-2H-pyran-4-carboxylic acid
  MOD_RES 11: note = N6-acetyl-N6-methyl-L-lysine
  MOD_RES 13: note = 3-(3-Pyridyl)-L-alanine
  MOD_RES 14: note = MeGly
  SITE 14: note = C-terminal N,N-dimethylamidyl
XXXTWKXXXKXNXX

SEQ ID NO: 382 - protein, 14 aa, synthetic construct
  SITE 1: note = N-terminal N,N,N-trimethyl-2-(2-(3-carbonylpropoxy)ethoxy)ethan-1-amin ium
  MOD_RES 1: note (2S,39S)-39-amino-5,24,33-trioxo-2-tridecanamido-9,12,15,18 ,21,28,31-heptaoxa-6,25,34-triazatetracontanedioic acid
  MOD_RES 2: note = L-penicillamine
  MOD_RES 3: note = N4,N4-dimethyl-L-asparagine
  MOD_RES 5: note = 7-methyl-L-tryptophan
  MOD_RES 6: note (2S,39S)-39-amino-5,24,33-trioxo-2-tridecanamido-9,12,15,18 ,21,28,31-heptaoxa-6,25,34-triazatetracontanedioic acid
  MOD_RES 7: note = L-penicillamine
  MOD_RES 8: note (S)-5-(4-(2-amino-2-carboxyethyl)phenoxy)-N,N,N-trimethylpe ntan-1-aminium
  MOD_RES 9: note = 3-(2-naphthyl)-L-alanine
  MOD_RES 10: note = 4-aminotetrahydro-2H-pyran-4-carboxylic acid
  MOD_RES 11: note = N6-acetyl-N6-methyl-L-lysine
  MOD_RES 13: note = 3-(3-Pyridyl)-L-alanine
  MOD_RES 14: note = MeGly
  SITE 14: note = C-terminal N,N-dimethylamidyl
XXNTWXXXXXXNXX

SEQ ID NO: 383 - protein, 36 aa, synthetic construct
  SITE 1: note = N-terminal acetyl
  MOD_RES 1: note = L-penicillamine
  MOD_RES 4: note = 7-methyl-L-tryptophan
  MOD_RES 5: note = N6-acetyl-L-lysine
  MOD_RES 6: note = L-penicillamine
  MOD_RES 7: note = 4-(2-aminoethoxy)-L-phenylalanine
  MOD_RES 8: note = 3-(2-naphthyl)-L-alanine
  MOD_RES 9: note = (S)-2,6-diamino-2-methylhexanoic acid
  SITE 12: note = C-terminal methylamidyl
XAAASNTHRTRPLYSXAAXAAXAALYSGLUASNHIS

SEQ ID NO: 384 - protein, 13 aa, synthetic construct
  SITE 1: note = N-terminal N,N,N-trimethyl-2-(2-(3-carbonylpropoxy)ethoxy)ethan-1-amin ium
  MOD_RES 1: note = L-penicillamine
  MOD_RES 2: note = N4,N4-dimethyl-L-asparagine
  MOD_RES 4: note = 7-methyl-L-tryptophan
  MOD_RES 5: note (S)-2-(2-(3-((5-amino-5-carboxypentyl)amino)-3-oxopropoxy)e thoxy)-N,N,N-trimethylethan-1-aminium
  MOD_RES 6: note = L-penicillamine
  MOD_RES 7: note (S)-5-(4-(2-amino-2-carboxyethyl)phenoxy)-N,N,N-trimethylpe ntan-1-aminium
  MOD_RES 8: note = 3-(2-naphthyl)-L-alanine
  MOD_RES 9: note = 4-aminotetrahydro-2H-pyran-4-carboxylic acid
  MOD_RES 10: note = N6-acetyl-N6-methyl-L-lysine
  MOD_RES 12: note = 3-(3-Pyridyl)-L-alanine
  MOD_RES 13: note = MeGly
  SITE 13: note = C-terminal N,N-dimethylamidyl
XNTWXXXXXXNXX

SEQ ID NO: 385 - protein, 14 aa, synthetic construct
  SITE 1: note = N-terminal PEG side chain
  MOD_RES 1: note (2S,39S)-39-amino-5,24,33-trioxo-2-tridecanamido-9,12,15,18 ,21,28,31-heptaoxa-6,25,34-triazatetracontanedioic acid
  MOD_RES 2: note = L-penicillamine
  MOD_RES 3: note = N4,N4-dimethyl-L-asparagine
  MOD_RES 5: note = 7-methyl-L-tryptophan
  MOD_RES 6: note = (S)-2-amino-4-(N-methylacetamido)butanoic acid
  MOD_RES 7: note = L-penicillamine
  MOD_RES 8: note (S)-5-(4-(2-amino-2-carboxyethyl)phenoxy)-N,N,N-trimethylpe ntan-1-aminium
  MOD_RES 9: note = 3-(2-naphthyl)-L-alanine
  MOD_RES 10: note = 4-aminotetrahydro-2H-pyran-4-carboxylic acid
  MOD_RES 11: note = N6-acetyl-N6-methyl-L-lysine
  MOD_RES 13: note = 3-(3-Pyridyl)-L-alanine
  MOD_RES 14: note = MeGly
  SITE 14: note = C-terminal N,N-dimethylamidyl
XXNTWXXXXXXNXX

SEQ ID NO: 386 - protein, 14 aa, synthetic construct
  SITE 1: note = N-terminal PEG side chain
  MOD_RES 1: note (2S,39S)-39-amino-5,24,33-trioxo-2-pentadecanamido-9,12,15, 18,21,28,31-heptaoxa-6,25,34-triazatetracontanedioic acid
  MOD_RES 2: note = L-penicillamine
  MOD_RES 3: note = N4,N4-dimethyl-L-asparagine
  MOD_RES 5: note = 7-methyl-L-tryptophan
  MOD_RES 6: note = (S)-2-amino-4-(N-methylacetamido)butanoic acid
  MOD_RES 7: note = L-penicillamine
  MOD_RES 8: note (S)-5-(4-(2-amino-2-carboxyethyl)phenoxy)-N,N,N-trimethylpe ntan-1-aminium
  MOD_RES 9: note = 3-(2-naphthyl)-L-alanine
  MOD_RES 10: note = 4-aminotetrahydro-2H-pyran-4-carboxylic acid
  MOD_RES 11: note = N6-acetyl-N6-methyl-L-lysine
  MOD_RES 13: note = 3-(3-Pyridyl)-L-alanine
  MOD_RES 14: note = MeGly
  SITE 14: note = C-terminal N,N-dimethylamidyl
XXNTWXXXXXXNXX

SEQ ID NO: 387 - protein, 13 aa, synthetic construct
  SITE 1: note = N-terminal N,N,N-trimethyl-2-(2-(3-carbonylpropoxy)ethoxy)ethan-1-amin ium
  MOD_RES 1: note = L-penicillamine
  MOD_RES 2: note (2S,39S)-39-amino-5,24,33-trioxo-2-tridecanamido-9,12,15,18 ,21,28,31-heptaoxa-6,25,34-triazatetracontanedioic acid
  MOD_RES 4: note = 7-methyl-L-tryptophan
  MOD_RES 5: note = N6-acetyl-N6-methyl-L-lysine
  MOD_RES 6: note = L-penicillamine
  MOD_RES 7: note (S)-5-(4-(2-amino-2-carboxyethyl)phenoxy)-N,N,N-trimethylpe ntan-1-aminium
  MOD_RES 8: note = 3-(2-naphthyl)-L-alanine
  MOD_RES 9: note = 4-aminotetrahydro-2H-pyran-4-carboxylic acid
  MOD_RES 10: note = N6-acetyl-N6-methyl-L-lysine
  MOD_RES 12: note = 3-(3-Pyridyl)-L-alanine
  MOD_RES 13: note = MeGly
  SITE 13: note = C-terminal N,N-dimethylamidyl
XXTWKXXXXKNXX

SEQ ID NO: 388 - protein, 13 aa, synthetic construct
  SITE 1: note = N-terminal N,N,N-trimethyl-2-(2-(3-carbonylpropoxy)ethoxy)ethan-1-amin ium
  MOD_RES 1: note = L-penicillamine
  MOD_RES 2: note (2S,39S)-39-amino-5,24,33-trioxo-2-pentadecanamido-9,12,15, 18,21,28,31-heptaoxa-6,25,34-triazatetracontanedioic acid
  MOD_RES 4: note = 7-methyl-L-tryptophan
  MOD_RES 5: note = N6-acetyl-N6-methyl-L-lysine
  MOD_RES 6: note = L-penicillamine
  MOD_RES 7: note (S)-5-(4-(2-amino-2-carboxyethyl)phenoxy)-N,N,N-trimethylpe ntan-1-aminium
  MOD_RES 8: note = 3-(2-naphthyl)-L-alanine
  MOD_RES 9: note = 4-aminotetrahydro-2H-pyran-4-carboxylic acid
  MOD_RES 10: note = N6-acetyl-N6-methyl-L-lysine
  MOD_RES 12: note = 3-(3-Pyridyl)-L-alanine
  MOD_RES 13: note = MeGly
  SITE 13: note = C-terminal N,N-dimethylamidyl
XXTWKXXXXKNXX

SEQ ID NO: 389 - protein, 13 aa, synthetic construct
  SITE 1: note = N-terminal N,N,N-trimethyl-2-(2-(3-carbonylpropoxy)ethoxy)ethan-1-amin ium
  MOD_RES 1: note = L-penicillamine
  MOD_RES 2: note (2S,39S)-39-amino-5,24,33-trioxo-2-tridecanamido-9,12,15,18 ,21,28,31-heptaoxa-6,25,34-triazatetracontanedioic acid
  MOD_RES 4: note = 7-methyl-L-tryptophan
  MOD_RES 5: note (2S,39S)-39-amino-5,24,33-trioxo-2-tridecanamido-9,12,15,18 ,21,28,31-heptaoxa-6,25,34-triazatetracontanedioic acid
  MOD_RES 6: note = L-penicillamine
  MOD_RES 7: note (S)-5-(4-(2-amino-2-carboxyethyl)phenoxy)-N,N,N-trimethylpe ntan-1-aminium
  MOD_RES 8: note = 3-(2-naphthyl)-L-alanine
  MOD_RES 9: note = 4-aminotetrahydro-2H-pyran-4-carboxylic acid
  MOD_RES 10: note = N6-acetyl-N6-methyl-L-lysine
  MOD_RES 12: note = 3-(3-Pyridyl)-L-alanine
  MOD_RES 13: note = MeGly
  SITE 13: note = C-terminal N,N-dimethylamidyl
XXTWXXXXXKNXX

SEQ ID NO: 390 - protein, 13 aa, synthetic construct
  SITE 1: note = N-terminal PEG side chain
  MOD_RES 1: note = L-penicillamine
  MOD_RES 2: note = N4,N4-dimethyl-L-asparagine
  MOD_RES 4: note = 7-methyl-L-tryptophan
  MOD_RES 5: note = N6-acetyl-N6-methyl-L-lysine
  MOD_RES 6: note = L-penicillamine
  MOD_RES 7: note (S)-5-(4-(2-amino-2-carboxyethyl)phenoxy)-N,N,N-trimethylpe ntan-1-aminium
  MOD_RES 8: note = 3-(2-naphthyl)-L-alanine
  MOD_RES 9: note = 4-aminotetrahydro-2H-pyran-4-carboxylic acid
  MOD_RES 10: note = N6-acetyl-N6-methyl-L-lysine
  MOD_RES 12: note = 3-(3-Pyridyl)-L-alanine
  MOD_RES 13: note = MeGly
  SITE 13: note = C-terminal N,N-dimethylamidyl
XNTWXXXXXXNXX

SEQ ID NO: 391 - protein, 13 aa, synthetic construct
  SITE 1: note = N-terminal N,N,N-trimethyl-2-(2-(3-carbonylpropoxy)ethoxy)ethan-1-amin ium
  MOD_RES 1: note = L-penicillamine
  MOD_RES 2: note = N4,N4-dimethyl-L-asparagine
  MOD_RES 4: note = 7-methyl-L-tryptophan
  MOD_RES 5: note = N6-acetyl-N6-methyl-L-lysine
  MOD_RES 6: note = L-penicillamine
  MOD_RES 7: note (S)-5-(4-(2-amino-2-carboxyethyl)phenoxy)-N,N,N-trimethylpe ntan-1-aminium
  MOD_RES 8: note = 3-(2-naphthyl)-L-alanine
  MOD_RES 9: note = 4-aminotetrahydro-2H-pyran-4-carboxylic acid
  MOD_RES 10: note = N6-acetyl-N6-methyl-L-lysine
  MOD_RES 12: note = 3-(3-Pyridyl)-L-alanine
  MOD_RES 13: note = MeGly
  SITE 13: note = C-terminal N,N-dimethylamidyl
XNTWXXXXXXNXX

SEQ ID NO: 392 - protein, 13 aa, synthetic construct
  SITE 1: note = N-terminal N,N,N-trimethyl-2-(2-(3-carbonylpropoxy)ethoxy)ethan-1-amin ium
  MOD_RES 1: note = L-penicillamine
  MOD_RES 2: note = N4,N4-dimethyl-L-asparagine
  MOD_RES 4: note = 7-methyl-L-tryptophan
  MOD_RES 5: note = N6-(5-guanidinopentanoyl)-L-lysine
  MOD_RES 6: note = L-penicillamine
  MOD_RES 7: note (S)-5-(4-(2-amino-2-carboxyethyl)phenoxy)-N,N,N-trimethylpe ntan-1-aminium
  MOD_RES 8: note = 3-(2-naphthyl)-L-alanine
  MOD_RES 9: note = 4-aminotetrahydro-2H-pyran-4-carboxylic acid
  MOD_RES 10: note = N6-acetyl-N6-methyl-L-lysine
  MOD_RES 12: note = 3-(3-Pyridyl)-L-alanine
  MOD_RES 13: note = MeGly
  SITE 13: note = C-terminal N,N-dimethylamidyl
XNTWXXXXXXNXX

SEQ ID NO: 393 - protein, 13 aa, synthetic construct
  SITE 1: note = N-terminal N,N,N-trimethyl-2-(2-(3-carbonylpropoxy)ethoxy)ethan-1-amin ium
  MOD_RES 1: note = L-penicillamine
  MOD_RES 2: note (S)-2-(2-(3-((5-amino-5-carboxypentyl)amino)-3-oxopropoxy)e thoxy)-N,N,N-trimethylethan-1-aminium
  MOD_RES 4: note = 7-methyl-L-tryptophan
  MOD_RES 5: note = N6-acetyl-N6-methyl-L-lysine
  MOD_RES 6: note = L-penicillamine
  MOD_RES 7: note (S)-5-(4-(2-amino-2-carboxyethyl)phenoxy)-N,N,N-trimethylpe ntan-1-aminium
  MOD_RES 8: note = 3-(2-naphthyl)-L-alanine
  MOD_RES 9: note = 4-aminotetrahydro-2H-pyran-4-carboxylic acid
  MOD_RES 10: note = N6-acetyl-N6-methyl-L-lysine
  MOD_RES 12: note = 3-(3-Pyridyl)-L-alanine
  MOD_RES 13: note = MeGly
  SITE 13: note = C-terminal N,N-dimethylamidyl
XXTWKXXXXKNXX

SEQ ID NO: 394 - protein, 14 aa, synthetic construct
  SITE 1: note = N-terminal N,N,N-trimethyl-2-(2-(3-carbonylpropoxy)ethoxy)ethan-1-amin ium
  MOD_RES 1: note (2S,39S)-39-amino-5,24,33-trioxo-2-tridecanamido-9,12,15,18 ,21,28,31-heptaoxa-6,25,34-triazatetracontanedioic acid
  MOD_RES 2: note = L-penicillamine
  MOD_RES 3: note = N4,N4-dimethyl-L-asparagine
  MOD_RES 5: note = 7-methyl-L-tryptophan
  MOD_RES 6: note = N6-acetyl-N6-methyl-L-lysine
  MOD_RES 7: note = L-penicillamine
  MOD_RES 8: note (S)-5-(4-(2-amino-2-carboxyethyl)phenoxy)-N,N,N-trimethylpe ntan-1-aminium
  MOD_RES 9: note = 3-(2-naphthyl)-L-alanine
  MOD_RES 10: note = 4-aminotetrahydro-2H-pyran-4-carboxylic acid
  MOD_RES 11: note (2S,39S)-39-amino-5,24,33-trioxo-2-tridecanamido-9,12,15,18 ,21,28,31-heptaoxa-6,25,34-triazatetracontanedioic acid
  MOD_RES 13: note = 3-(3-Pyridyl)-L-alanine
  MOD_RES 14: note = MeGly
  SITE 14: note = C-terminal N,N-dimethylamidyl
XXNTWXXXXXXNXX

SEQ ID NO: 395 - protein, 14 aa, synthetic construct
  SITE 1: note = N-terminal N,N,N-trimethyl-2-(2-(3-carbonylpropoxy)ethoxy)ethan-1-amin ium
  MOD_RES 1: note (2S,39S)-39-amino-5,24,33-trioxo-2-pentadecanamido-9,12,15, 18,21,28,31-heptaoxa-6,25,34-triazatetracontanedioic acid
  MOD_RES 2: note = L-penicillamine
  MOD_RES 3: note = N4,N4-dimethyl-L-asparagine
  MOD_RES 5: note = 7-methyl-L-tryptophan
  MOD_RES 6: note = N6-acetyl-N6-methyl-L-lysine
  MOD_RES 7: note = L-penicillamine
  MOD_RES 8: note (S)-5-(4-(2-amino-2-carboxyethyl)phenoxy)-N,N,N-trimethylpe ntan-1-aminium
  MOD_RES 9: note = 3-(2-naphthyl)-L-alanine
  MOD_RES 10: note = 4-aminotetrahydro-2H-pyran-4-carboxylic acid
  MOD_RES 11: note (2S,39S)-39-amino-5,24,33-trioxo-2-pentadecanamido-9,12,15, 18,21,28,31-heptaoxa-6,25,34-triazatetracontanedioic acid
  MOD_RES 13: note = 3-(3-Pyridyl)-L-alanine
  MOD_RES 14: note = MeGly
  SITE 14: note = C-terminal N,N-dimethylamidyl
XXNTWXXXXXXNXX

SEQ ID NO: 396 - protein, 13 aa, synthetic construct
  SITE 1: note = N-terminal N,N,N-trimethyl-2-(2-(3-carbonylpropoxy)ethoxy)ethan-1-amin ium
  MOD_RES 1: note = L-penicillamine
  MOD_RES 2: note (2S,39S)-39-amino-5,24,33-trioxo-2-pentadecanamido-9,12,15, 18,21,28,31-heptaoxa-6,25,34-triazatetracontanedioic acid
  MOD_RES 4: note = 7-methyl-L-tryptophan
  MOD_RES 5: note (2S,39S)-39-amino-5,24,33-trioxo-2-pentadecanamido-9,12,15, 18,21,28,31-heptaoxa-6,25,34-triazatetracontanedioic acid
  MOD_RES 6: note = L-penicillamine
  MOD_RES 7: note (S)-5-(4-(2-amino-2-carboxyethyl)phenoxy)-N,N,N-trimethylpe ntan-1-aminium
  MOD_RES 8: note = 3-(2-naphthyl)-L-alanine
  MOD_RES 9: note = 4-aminotetrahydro-2H-pyran-4-carboxylic acid
  MOD_RES 10: note = N6-acetyl-N6-methyl-L-lysine
  MOD_RES 12: note = 3-(3-Pyridyl)-L-alanine
  MOD_RES 13: note = MeGly
  SITE 13: note = C-terminal N,N-dimethylamidyl
XXTWXXXXXKNXX

SEQ ID NO: 397 - protein, 13 aa, synthetic construct
  SITE 1: note = N-terminal N,N,N-trimethyl-2-(2-(3-carbonylpropoxy)ethoxy)ethan-1-amin ium
  MOD_RES 1: note = L-penicillamine
  MOD_RES 2: note (2S,39S)-39-amino-5,24,33-trioxo-2-tridecanamido-9,12,15,18 ,21,28,31-heptaoxa-6,25,34-triazatetracontanedioic acid
  MOD_RES 4: note = 7-methyl-L-tryptophan
  MOD_RES 5: note = N6-acetyl-N6-methyl-L-lysine
  MOD_RES 6: note = L-penicillamine
  MOD_RES 7: note (S)-5-(4-(2-amino-2-carboxyethyl)phenoxy)-N,N,N-trimethylpe ntan-1-aminium
  MOD_RES 8: note = 3-(2-naphthyl)-L-alanine
  MOD_RES 9: note = 4-aminotetrahydro-2H-pyran-4-carboxylic acid
  MOD_RES 10: note (2S,39S)-39-amino-5,24,33-trioxo-2-tridecanamido-9,12,15,18 ,21,28,31-heptaoxa-6,25,34-triazatetracontanedioic acid
  MOD_RES 12: note = 3-(3-Pyridyl)-L-alanine
  MOD_RES 13: note = MeGly
  SITE 13: note = C-terminal N,N-dimethylamidyl
XXTWKXXXXXNXX

SEQ ID NO: 398 - protein, 13 aa, synthetic construct
  SITE 1: note = N-terminal N,N,N-trimethyl-2-(2-(3-carbonylpropoxy)ethoxy)ethan-1-amin ium
  MOD_RES 1: note = L-penicillamine
  MOD_RES 2: note (2S,39S)-39-amino-5,24,33-trioxo-2-pentadecanamido-9,12,15, 18,21,28,31-heptaoxa-6,25,34-triazatetracontanedioic acid
  MOD_RES 4: note = 7-methyl-L-tryptophan
  MOD_RES 5: note = N6-acetyl-N6-methyl-L-lysine
  MOD_RES 6: note = L-penicillamine
  MOD_RES 7: note (S)-5-(4-(2-amino-2-carboxyethyl)phenoxy)-N,N,N-trimethylpe ntan-1-aminium
  MOD_RES 8: note = 3-(2-naphthyl)-L-alanine
  MOD_RES 9: note = 4-aminotetrahydro-2H-pyran-4-carboxylic acid
  MOD_RES 10: note (2S,39S)-39-amino-5,24,33-trioxo-2-pentadecanamido-9,12,15, 18,21,28,31-heptaoxa-6,25,34-triazatetracontanedioic acid
  MOD_RES 12: note = 3-(3-Pyridyl)-L-alanine
  MOD_RES 13: note = MeGly
  SITE 13: note = C-terminal N,N-dimethylamidyl
XXTWKXXXXXNXX

SEQ ID NO: 399 - protein, 13 aa, synthetic construct
  SITE 1: note = N-terminal N,N,N-trimethyl-2-(2-(3-carbonylpropoxy)ethoxy)ethan-1-amin ium
  MOD_RES 1: note = L-penicillamine
  MOD_RES 2: note = N4,N4-dimethyl-L-asparagine
  MOD_RES 4: note = 7-methyl-L-tryptophan
  MOD_RES 5: note (2S,39S)-39-amino-5,24,33-trioxo-2-pentadecanamido-9,12,15, 18,21,28,31-heptaoxa-6,25,34-triazatetracontanedioic acid
  MOD_RES 6: note = L-penicillamine
  MOD_RES 7: note (S)-5-(4-(2-amino-2-carboxyethyl)phenoxy)-N,N,N-trimethylpe ntan-1-aminium
  MOD_RES 8: note = 3-(2-naphthyl)-L-alanine
  MOD_RES 9: note = 4-aminotetrahydro-2H-pyran-4-carboxylic acid
  MOD_RES 10: note = N6-acetyl-N6-methyl-L-lysine
  MOD_RES 12: note = 3-(3-Pyridyl)-L-alanine
  MOD_RES 13: note = MeGly
  SITE 13: note = C-terminal N,N-dimethylamidyl
XNTWXXXXXXNXX

SEQ ID NO: 400 - protein, 13 aa, synthetic construct
  SITE 1: note = N-terminal N,N,N-trimethyl-2-(2-(3-carbonylpropoxy)ethoxy)ethan-1-amin ium
  MOD_RES 1: note = L-penicillamine
  MOD_RES 2: note = N4,N4-dimethyl-L-asparagine
  MOD_RES 4: note = 7-methyl-L-tryptophan
  MOD_RES 5: note (2S,39S)-39-amino-5,24,33-trioxo-2-tridecanamido-9,12,15,18 ,21,28,31-heptaoxa-6,25,34-triazatetracontanedioic acid
  MOD_RES 6: note = L-penicillamine
  MOD_RES 7: note (S)-5-(4-(2-amino-2-carboxyethyl)phenoxy)-N,N,N-trimethylpe ntan-1-aminium
  MOD_RES 8: note = 3-(2-naphthyl)-L-alanine
  MOD_RES 9: note = 4-aminotetrahydro-2H-pyran-4-carboxylic acid
  MOD_RES 10: note (2S,39S)-39-amino-5,24,33-trioxo-2-tridecanamido-9,12,15,18 ,21,28,31-heptaoxa-6,25,34-triazatetracontanedioic acid
  MOD_RES 12: note = 3-(3-Pyridyl)-L-alanine
  MOD_RES 13: note = MeGly
  SITE 13: note = C-terminal N,N-dimethylamidyl
XNTWXXXXXXNXX

SEQ ID NO: 401 - protein, 13 aa, synthetic construct
  SITE 1: note = N-terminal N,N,N-trimethyl-2-(2-(3-carbonylpropoxy)ethoxy)ethan-1-amin ium
  MOD_RES 1: note = L-penicillamine
  MOD_RES 2: note = N4,N4-dimethyl-L-asparagine
  MOD_RES 4: note = 7-methyl-L-tryptophan
  MOD_RES 5: note = N6-acetyl-N6-methyl-L-lysine
  MOD_RES 6: note = L-penicillamine
  MOD_RES 7: note (S)-5-(4-(2-amino-2-carboxyethyl)phenoxy)-N,N,N-trimethylpe ntan-1-aminium
  MOD_RES 8: note = 3-(2-naphthyl)-L-alanine
  MOD_RES 9: note = 4-aminotetrahydro-2H-pyran-4-carboxylic acid
  MOD_RES 10: note (2S,39S)-39-amino-5,24,33-trioxo-2-tridecanamido-9,12,15,18 ,21,28,31-heptaoxa-6,25,34-triazatetracontanedioic acid
  MOD_RES 12: note = 3-(3-Pyridyl)-L-alanine
  MOD_RES 13: note = MeGly
  SITE 13: note = C-terminal N,N-dimethylamidyl
XNTWXXXXXXNXX

SEQ ID NO: 402 - protein, 13 aa, synthetic construct
  SITE 1: note = N-terminal N,N,N-trimethyl-2-(2-(3-carbonylpropoxy)ethoxy)ethan-1-amin ium
  MOD_RES 1: note = L-penicillamine
  MOD_RES 2: note = N4,N4-dimethyl-L-asparagine
  MOD_RES 4: note = 7-methyl-L-tryptophan
  MOD_RES 5: note = N6-acetyl-N6-methyl-L-lysine
  MOD_RES 6: note = L-penicillamine
  MOD_RES 7: note (S)-5-(4-(2-amino-2-carboxyethyl)phenoxy)-N,N,N-trimethylpe ntan-1-aminium
  MOD_RES 8: note = 3-(2-naphthyl)-L-alanine
  MOD_RES 9: note = 4-aminotetrahydro-2H-pyran-4-carboxylic acid
  MOD_RES 10: note (2S,39S)-39-amino-5,24,33-trioxo-2-pentadecanamido-9,12,15, 18,21,28,31-heptaoxa-6,25,34-triazatetracontanedioic acid
  MOD_RES 12: note = 3-(3-Pyridyl)-L-alanine
  MOD_RES 13: note = MeGly
  SITE 13: note = C-terminal N,N-dimethylamidyl
XNTWXXXXXXNXX

SEQ ID NO: 403 - protein, 13 aa, synthetic construct
  SITE 1: note = N-terminal (5-guanidinopentanoyl)amidyl
  MOD_RES 1: note = L-penicillamine
  MOD_RES 2: note = N4,N4-dimethyl-L-asparagine
  MOD_RES 4: note = 7-methyl-L-tryptophan
  MOD_RES 5: note = N6-acetyl-N6-methyl-L-lysine
  MOD_RES 6: note = L-penicillamine
  MOD_RES 7: note (S)-5-(4-(2-amino-2-carboxyethyl)phenoxy)-N,N,N-trimethylpe ntan-1-aminium
  MOD_RES 8: note = 3-(2-naphthyl)-L-alanine
  MOD_RES 9: note = 4-aminotetrahydro-2H-pyran-4-carboxylic acid
  MOD_RES 10: note = N6-acetyl-N6-methyl-L-lysine
  MOD_RES 12: note = 3-(3-Pyridyl)-L-alanine
  MOD_RES 13: note = MeGly
  SITE 13: note = C-terminal N,N-dimethylamidyl
XNTWXXXXXXNXX

SEQ ID NO: 404 - protein, 14 aa, synthetic construct
  SITE 1: note = N-terminal N,N,N-trimethyl-2-(2-(3-carbonylpropoxy)ethoxy)ethan-1-amin ium
  MOD_RES 1: note (2S,39R)-39-amino-2-dodecanamido-5,24,33-trioxo-9,12,15,18, 21,28,31-heptaoxa-6,25,34-triazatetracontanedioic acid
  MOD_RES 2: note = L-penicillamine
  MOD_RES 3: note = N4,N4-dimethyl-L-asparagine
  MOD_RES 5: note = 7-methyl-L-tryptophan
  MOD_RES 6: note = N6-acetyl-L-lysine
  MOD_RES 7: note = L-penicillamine
  MOD_RES 8: note (S)-5-(4-(2-amino-2-carboxyethyl)phenoxy)-N,N,N-trimethylpe ntan-1-aminium
  MOD_RES 9: note = 3-(2-naphthyl)-L-alanine
  MOD_RES 10: note = 4-aminotetrahydro-2H-pyran-4-carboxylic acid
  MOD_RES 11: note = N6-acetyl-N6-methyl-L-lysine
  MOD_RES 13: note = 3-(3-Pyridyl)-L-alanine
  MOD_RES 14: note = Modified N-methyl-L-lysine with PEG-ylated side chain
  SITE 14: note = C-terminal amidyl
XXNTWKXXXXXNXX

SEQ ID NO: 405 - protein, 13 aa, synthetic construct
  SITE 1: note = N-terminal N,N,N-trimethyl-2-(2-(3-carbonylpropoxy)ethoxy)ethan-1-amin ium
  MOD_RES 1: note = L-penicillamine
  MOD_RES 2: note = N4,N4-dimethyl-L-asparagine
  MOD_RES 4: note = 7-methyl-L-tryptophan
  MOD_RES 5: note = N6-acetyl-N6-methyl-L-lysine
  MOD_RES 6: note = L-penicillamine
  MOD_RES 7: note (S)-2-amino-3-(4-(2-(2-(2-guanidinoethoxy)ethoxy)ethoxy)phe nyl)propanoic acid
  MOD_RES 8: note = 3-(2-naphthyl)-L-alanine
  MOD_RES 9: note = 4-aminotetrahydro-2H-pyran-4-carboxylic acid
  MOD_RES 10: note = N6-acetyl-N6-methyl-L-lysine
  MOD_RES 12: note = 3-(3-Pyridyl)-L-alanine
  MOD_RES 13: note = MeGly
  SITE 13: note = C-terminal N,N-dimethylamidyl
XNTWXXXXXXNXX

SEQ ID NO: 406 - protein, 13 aa, synthetic construct
  SITE 1: note = N-terminal PEG side chain
  MOD_RES 1: note = L-penicillamine
  MOD_RES 2: note = N4,N4-dimethyl-L-asparagine
  MOD_RES 4: note = 7-methyl-L-tryptophan
  MOD_RES 5: note = N6-acetyl-N6-methyl-L-lysine
  MOD_RES 6: note = L-penicillamine
  MOD_RES 7: note (S)-2-(2-(2-(4-(2-amino-2-carboxyethyl)phenoxy)ethoxy)ethox y)-N,N,N-trimethylethan-1-aminium
  MOD_RES 8: note = 3-(2-naphthyl)-L-alanine
  MOD_RES 9: note = 4-aminotetrahydro-2H-pyran-4-carboxylic acid
  MOD_RES 10: note = N6-acetyl-N6-methyl-L-lysine
  MOD_RES 12: note = 3-(3-Pyridyl)-L-alanine
  MOD_RES 13: note = MeGly
  SITE 13: note = C-terminal N,N-dimethylamidyl
XNTWXXXXXXNXX

SEQ ID NO: 407 - protein, 13 aa, synthetic construct
  SITE 1: note = N-terminal N,N,N-trimethyl-2-(2-(3-carbonylpropoxy)ethoxy)ethan-1-amin ium
  MOD_RES 1: note = L-penicillamine
  MOD_RES 2: note = N4,N4-dimethyl-L-asparagine
  MOD_RES 4: note = 7-methyl-L-tryptophan
  MOD_RES 5: note = N6-acetyl-L-lysine
  MOD_RES 6: note = L-penicillamine
  MOD_RES 7: note (S)-5-(4-(2-amino-2-carboxyethyl)phenoxy)-N,N,N-trimethylpe ntan-1-aminium
  MOD_RES 8: note = 3-(2-naphthyl)-L-alanine
  MOD_RES 9: note = 4-aminotetrahydro-2H-pyran-4-carboxylic acid
  MOD_RES 10: note = N6-acetyl-N6-methyl-L-lysine
  MOD_RES 12: note = 3-(3-Pyridyl)-L-alanine
  MOD_RES 13: note = Modified N-methyl-L-lysine with PEG-ylated side chain
  SITE 13: note = C-terminal amidyl
XNTWKXXXXXNXX

SEQ ID NO: 408 - protein, 13 aa, synthetic construct
  SITE 1: note = N-terminal N,N,N-trimethyl-2-(2-(3-carbonylpropoxy)ethoxy)ethan-1-amin ium
  MOD_RES 1: note = L-penicillamine
  MOD_RES 2: note = N4,N4-dimethyl-L-asparagine
  MOD_RES 4: note = 7-methyl-L-tryptophan
  MOD_RES 5: note = N6-acetyl-L-lysine
  MOD_RES 6: note = L-penicillamine
  MOD_RES 7: note (S)-5-(4-(2-amino-2-carboxyethyl)phenoxy)-N,N,N-trimethylpe ntan-1-aminium
  MOD_RES 8: note = 3-(2-naphthyl)-L-alanine
  MOD_RES 9: note = 4-aminotetrahydro-2H-pyran-4-carboxylic acid
  MOD_RES 10: note = N6-acetyl-N6-methyl-L-lysine
  MOD_RES 12: note = 3-(3-Pyridyl)-L-alanine
  MOD_RES 13: note = Modified N-methyl-L-lysine with PEG-ylated side chain
  SITE 13: note = C-terminal amidyl
XNTWKXXXXXNXX

SEQ ID NO: 409 - protein, 13 aa, synthetic construct
  SITE 1: note = N-terminal N,N,N-trimethyl-2-(2-(3-carbonylpropoxy)ethoxy)ethan-1-amin ium
  MOD_RES 1: note = L-penicillamine
  MOD_RES 2: note = N4,N4-dimethyl-L-asparagine
  MOD_RES 4: note = 7-methyl-L-tryptophan
  MOD_RES 5: note = N6-acetyl-L-lysine
  MOD_RES 6: note = L-penicillamine
  MOD_RES 7: note (S)-5-(4-(2-amino-2-carboxyethyl)phenoxy)-N,N,N-trimethylpe ntan-1-aminium
  MOD_RES 8: note = 3-(2-naphthyl)-L-alanine
  MOD_RES 9: note = 4-aminotetrahydro-2H-pyran-4-carboxylic acid
  MOD_RES 10: note = N6-acetyl-N6-methyl-L-lysine
  MOD_RES 12: note = 3-(3-Pyridyl)-L-alanine
  MOD_RES 13: note = Modified N-methyl-L-lysine with PEG-ylated side chain
  SITE 13: note = C-terminal amidyl
XNTWKXXXXXNXX

SEQ ID NO: 410 - protein, 13 aa, synthetic construct
  SITE 1: note = N-terminal N,N,N-trimethyl-2-(2-(3-carbonylpropoxy)ethoxy)ethan-1-amin ium
  MOD_RES 1: note = L-penicillamine
  MOD_RES 2: note = N4,N4-dimethyl-L-asparagine
  MOD_RES 4: note = 7-methyl-L-tryptophan
  MOD_RES 5: note (2S,39S)-39-amino-5,24,33-trioxo-2-pentadecanamido-9,12,15, 18,21,28,31-heptaoxa-6,25,34-triazatetracontanedioic acid
  MOD_RES 6: note = L-penicillamine
  MOD_RES 7: note (S)-5-(4-(2-amino-2-carboxyethyl)phenoxy)-N,N,N-trimethylpe ntan-1-aminium
  MOD_RES 8: note = 3-(2-naphthyl)-L-alanine
  MOD_RES 9: note = 4-aminotetrahydro-2H-pyran-4-carboxylic acid
  MOD_RES 10: note (2S,39S)-39-amino-5,24,33-trioxo-2-pentadecanamido-9,12,15, 18,21,28,31-heptaoxa-6,25,34-triazatetracontanedioic acid
  MOD_RES 12: note = 3-(3-Pyridyl)-L-alanine
  MOD_RES 13: note = MeGly
  SITE 13: note = C-terminal N,N-dimethylamidyl
XNTWXXXXXXNXX

SEQ ID NO: 411 - protein, 13 aa, synthetic construct
  SITE 1: note = N-terminal N,N,N-trimethyl-2-(2-(3-carbonylpropoxy)ethoxy)ethan-1-amin ium
  MOD_RES 1: note = L-penicillamine
  MOD_RES 2: note = (S)-2-amino-4-guanidinobutanoic acid
  MOD_RES 4: note = 7-methyl-L-tryptophan
  MOD_RES 5: note = N6-acetyl-N6-methyl-L-lysine
  MOD_RES 6: note = L-penicillamine
  MOD_RES 7: note (S)-2-(2-(2-(4-(2-amino-2-carboxyethyl)phenoxy)ethoxy)ethox y)-N,N,N-trimethylethan-1-aminium
  MOD_RES 8: note = 3-(2-naphthyl)-L-alanine
  MOD_RES 9: note = 4-aminotetrahydro-2H-pyran-4-carboxylic acid
  MOD_RES 10: note = N6-acetyl-N6-methyl-L-lysine
  MOD_RES 12: note = 3-(3-Pyridyl)-L-alanine
  MOD_RES 13: note = MeGly
  SITE 13: note = C-terminal N,N-dimethylamidyl
XXTWKXXXXKNXX

SEQ ID NO: 412 - protein, 13 aa, synthetic construct
  SITE 1: note = N-terminal acetyl
  MOD_RES 1: note = L-penicillamine
  MOD_RES 2: note = (S)-2-amino-4-guanidinobutanoic acid
  MOD_RES 4: note = 7-methyl-L-tryptophan
  MOD_RES 5: note = N6-acetyl-N6-methyl-L-lysine
  MOD_RES 6: note = L-penicillamine
  MOD_RES 7: note (S)-2-(2-(2-(4-(2-amino-2-carboxyethyl)phenoxy)ethoxy)ethox y)-N,N,N-trimethylethan-1-aminium
  MOD_RES 8: note = 3-(2-naphthyl)-L-alanine
  MOD_RES 9: note = 4-aminotetrahydro-2H-pyran-4-carboxylic acid
  MOD_RES 10: note = N6-acetyl-N6-methyl-L-lysine
  MOD_RES 12: note = 3-(3-Pyridyl)-L-alanine
  MOD_RES 13: note = MeGly
  SITE 13: note = C-terminal N,N-dimethylamidyl
XXTWKXXXXKNXX

SEQ ID NO: 413 - protein, 13 aa, synthetic construct
  SITE 1: note = N-terminal PEG side chain
  MOD_RES 1: note = L-penicillamine
  MOD_RES 2: note = N4,N4-dimethyl-L-asparagine
  MOD_RES 4: note = 7-methyl-L-tryptophan
  MOD_RES 5: note = N6-acetyl-N6-methyl-L-lysine
  MOD_RES 6: note = L-penicillamine
  MOD_RES 7: note (S)-2-(2-(2-(4-(2-amino-2-carboxyethyl)phenoxy)ethoxy)ethox y)-N,N,N-trimethylethan-1-aminium
  MOD_RES 8: note = 3-(2-naphthyl)-L-alanine
  MOD_RES 9: note = 4-aminotetrahydro-2H-pyran-4-carboxylic acid
  MOD_RES 10: note = N6-acetyl-N6-methyl-L-lysine
  MOD_RES 12: note = 3-(3-Pyridyl)-L-alanine
  MOD_RES 13: note = MeGly
  SITE 13: note = C-terminal N,N-dimethylamidyl
XNTWXXXXXXNXX

SEQ ID NO: 414 - protein, 13 aa, synthetic construct
  SITE 1: note = C-terminal N,N-dimethylamidyl
  MOD_RES 1: note = L-penicillamine
  MOD_RES 2: note = N4,N4-dimethyl-L-asparagine
  MOD_RES 4: note = 7-methyl-L-tryptophan
  MOD_RES 5: note = 3-(N-methlyacetamido)-L-alanine
  MOD_RES 6: note = L-penicillamine
  MOD_RES 7: note (S)-5-(4-(2-amino-2-carboxyethyl)phenoxy)-N,N,N-trimethylpe ntan-1-aminium
  MOD_RES 8: note = 3-(2-naphthyl)-L-alanine
  MOD_RES 9: note = 4-aminotetrahydro-2H-pyran-4-carboxylic acid
  MOD_RES 10: note = N6-acetyl-N6-methyl-L-lysine
  MOD_RES 12: note = 3-(3-Pyridyl)-L-alanine
  MOD_RES 13: note = MeGly
  SITE 13: note = C-terminal N,N-dimethylamidyl
XNTWXXXXXXNXX

SEQ ID NO: 415 - protein, 13 aa, synthetic construct
  SITE 1: note = N-terminal N,N,N-trimethyl-2-(2-(3-carbonylpropoxy)ethoxy)ethan-1-amin ium
  MOD_RES 1: note = L-penicillamine
  MOD_RES 2: note = N4,N4-dimethyl-L-asparagine
  MOD_RES 4: note = 7-methyl-L-tryptophan
  MOD_RES 5: note = N6-acetyl-L-lysine
  MOD_RES 6: note = L-penicillamine
  MOD_RES 7: note (S)-5-(4-(2-amino-2-carboxyethyl)phenoxy)-N,N,N-trimethylpe ntan-1-aminium
  MOD_RES 8: note = 3-(2-naphthyl)-L-alanine
  MOD_RES 9: note = 4-aminotetrahydro-2H-pyran-4-carboxylic acid
  MOD_RES 10: note = 3-(N-methlyacetamido)-L-alanine
  MOD_RES 12: note = 3-(3-Pyridyl)-L-alanine
  MOD_RES 13: note = MeGly
  SITE 13: note = C-terminal N,N-dimethylamidyl
XNTWKXXXXXNXX

SEQ ID NO: 416 - protein, 13 aa, synthetic construct
  SITE 1: note = N-terminal N,N,N-trimethyl-2-(2-(3-carbonylpropoxy)ethoxy)ethan-1-amin ium
  MOD_RES 1: note = L-penicillamine
  MOD_RES 2: note = (S)-3-amino-3-carboxy-N,N,N-trimethylpropan-1-aminium
  MOD_RES 4: note = 7-methyl-L-tryptophan
  MOD_RES 5: note = N6-acetyl-N6-methyl-L-lysine
  MOD_RES 6: note = L-penicillamine
  MOD_RES 7: note (S)-2-(2-(2-(4-(2-amino-2-carboxyethyl)phenoxy)ethoxy)ethox y)-N,N,N-trimethylethan-1-aminium
  MOD_RES 8: note = 3-(2-naphthyl)-L-alanine
  MOD_RES 9: note = 4-aminotetrahydro-2H-pyran-4-carboxylic acid
  MOD_RES 10: note = N6-acetyl-N6-methyl-L-lysine
  MOD_RES 12: note = 3-(3-Pyridyl)-L-alanine
  MOD_RES 13: note = MeGly
  SITE 13: note = C-terminal N,N-dimethylamidyl
XXTWKXXXXXNXX

SEQ ID NO: 417 - protein, 13 aa, synthetic construct
  SITE 1: note = N-terminal acetyl
  MOD_RES 1: note = L-penicillamine
  MOD_RES 4: note = 7-methyl-L-tryptophan
  MOD_RES 5: note = N6-acetyl-L-lysine
  MOD_RES 6: note = L-penicillamine
  MOD_RES 7: note = p-Azido-L-phenylalanine
  MOD_RES 8: note = 3-(2-naphthyl)-L-alanine
  MOD_RES 9: note = 4-aminotetrahydro-2H-pyran-4-carboxylic acid
  MOD_RES 10: note = N6-acetyl-L-lysine
  MOD_RES 12: note = 3-(3-Pyridyl)-L-alanine
  MOD_RES 13: note = MeGly
  SITE 13: note = C-terminal amidyl
XNTWKXXXXKNXX

SEQ ID NO: 418 - protein, 13 aa, synthetic construct
  SITE 1: note = N-terminal N,N,N-trimethyl-2-(2-(3-carbonylpropoxy)ethoxy)ethan-1-amin ium
  MOD_RES 1: note = L-penicillamine
  MOD_RES 4: note = 7-methyl-L-tryptophan
  MOD_RES 5: note = N6-acetyl-L-lysine
  MOD_RES 6: note = L-penicillamine
  MOD_RES 7: note = p-Azido-L-phenylalanine
  MOD_RES 8: note = 3-(2-naphthyl)-L-alanine
  MOD_RES 9: note = 4-aminotetrahydro-2H-pyran-4-carboxylic acid
  MOD_RES 10: note = N6-acetyl-L-lysine
  MOD_RES 12: note = 3-(3-Pyridyl)-L-alanine
  MOD_RES 13: note = MeGly
  SITE 13: note = C-terminal amidyl
XNTWKXXXXKNXX

SEQ ID NO: 419 - protein, 13 aa, synthetic construct
  SITE 1: note = N-terminal N,N,N-trimethyl-2-(2-(3-carbonylpropoxy)ethoxy)ethan-1-amin ium
  MOD_RES 1: note = L-penicillamine
  MOD_RES 2: note = N4,N4-dimethyl-L-asparagine
  MOD_RES 4: note = 7-methyl-L-tryptophan
  MOD_RES 5: note = N6-acetyl-N6-methyl-L-lysine
  MOD_RES 6: note = L-penicillamine
  MOD_RES 7: note (S)-2-(2-(2-(4-(2-amino-2-carboxyethyl)phenoxy)ethoxy)ethox y)-N,N,N-trimethylethan-1-aminium
  MOD_RES 8: note = 3-(2-naphthyl)-L-alanine
  MOD_RES 9: note = 4-aminotetrahydro-2H-pyran-4-carboxylic acid
  MOD_RES 10: note = 3-(N-methlyacetamido)-L-alanine
  MOD_RES 12: note = 3-(3-Pyridyl)-L-alanine
  MOD_RES 13: note = MeGly
  SITE 13: note = C-terminal N,N-dimethylamidyl
XNTWXXXXXXNXX

SEQ ID NO: 420 - protein, 13 aa, synthetic construct
  SITE 1: note = N-terminal N,N,N-trimethyl-2-(2-(3-carbonylpropoxy)ethoxy)ethan-1-amin ium
  MOD_RES 1: note = L-penicillamine
  MOD_RES 4: note = 7-methyl-L-tryptophan
  MOD_RES 5: note = N6-acetyl-L-lysine
  MOD_RES 6: note = L-penicillamine
  MOD_RES 7: note (S)-3-(1-(4-(2-amino-2-carboxyethyl)phenyl)-1H-1,2,3-triazo l-4-yl)-N,N,N-trimethylpropan-1-aminium
  MOD_RES 8: note = 3-(2-naphthyl)-L-alanine
  MOD_RES 9: note = 4-aminotetrahydro-2H-pyran-4-carboxylic acid
  MOD_RES 10: note = N6-acetyl-L-lysine
  MOD_RES 12: note = 3-(3-Pyridyl)-L-alanine
  MOD_RES 13: note = MeGly
  SITE 13: note = C-terminal amidyl
XNTWKXXXXKNXX

SEQ ID NO: 421 - protein, 13 aa, synthetic construct
  SITE 1: note = N-terminal N,N,N-trimethyl-2-(2-(3-carbonylpropoxy)ethoxy)ethan-1-amin ium
  MOD_RES 1: note = L-penicillamine
  MOD_RES 2: note = N4,N4-dimethyl-L-asparagine
  MOD_RES 4: note (S)-3-(7-(3-acetamidophenyl)-1H-indol-3-yl)-2-aminopropanoi c acid
  MOD_RES 5: note = N6-acetyl-N6-methyl-L-lysine
  MOD_RES 6: note = L-penicillamine
  MOD_RES 7: note (S)-4-(2-(4-(2-amino-2-carboxyethyl)phenoxy)ethyl)-4-methyl morpholin-4-ium
  MOD_RES 8: note = 3-(2-naphthyl)-L-alanine
  MOD_RES 9: note = 4-aminotetrahydro-2H-pyran-4-carboxylic acid
  MOD_RES 10: note = N6-acetyl-N6-methyl-L-lysine
  MOD_RES 12: note = 3-(3-Pyridyl)-L-alanine
  MOD_RES 13: note = MeGly
  SITE 13: note = C-terminal N,N-dimethylamidyl
XNTXKXXXXKNXX

SEQ ID NO: 422 - protein, 14 aa, synthetic construct
  SITE 1: note = N-terminal 2,5,8,11,14,17-hexaoxaicosan-20-oyl
  SITE 1: note = D-Arginine
  MOD_RES 2: note = L-penicillamine
  MOD_RES 5: note (S)-3-(7-(3-acetamidophenyl)-1H-indol-3-yl)-2-aminopropanoi c acid
  MOD_RES 6: note = N6-acetyl-L-lysine
  MOD_RES 7: note = L-penicillamine
  MOD_RES 8: note = 4-(2-aminoethoxy)-L-phenylalanine
  MOD_RES 9: note = 3-(2-naphthyl)-L-alanine
  MOD_RES 10: note = 4-aminotetrahydro-2H-pyran-4-carboxylic acid
  MOD_RES 13: note = 3-(3-Pyridyl)-L-alanine
  MOD_RES 14: note = MeGly
  SITE 14: note = C-terminal amidyl
RXNTXKXXXXENXX

SEQ ID NO: 423 - protein, 13 aa, synthetic construct
  SITE 1: note = N-terminal acetyl
  MOD_RES 1: note = L-penicillamine
  MOD_RES 4: note = 7-methyl-L-tryptophan
  MOD_RES 5: note = N6-acetyl-L-lysine
  MOD_RES 6: note = L-penicillamine
  MOD_RES 7: note (S)-3-(1-(4-(2-amino-2-carboxyethyl)phenyl)-1H-1,2,3-triazo l-4-yl)-N,N,N-trimethylpropan-1-aminium
  MOD_RES 8: note = 3-(2-naphthyl)-L-alanine
  MOD_RES 9: note = 4-aminotetrahydro-2H-pyran-4-carboxylic acid
  MOD_RES 10: note = N6-acetyl-L-lysine
  MOD_RES 12: note = 3-(3-Pyridyl)-L-alanine
  MOD_RES 13: note = MeGly
  SITE 13: note = C-terminal amidyl
XNTWKXXXXKNXX

SEQ ID NO: 424 - protein, 13 aa, synthetic construct
  SITE 1: note = N-terminal N,N,N-trimethyl-2-(2-(3-carbonylpropoxy)ethoxy)ethan-1-amin ium
  MOD_RES 1: note = L-penicillamine
  MOD_RES 4: note = 7-methyl-L-tryptophan
  MOD_RES 5: note = N6-acetyl-L-lysine
  MOD_RES 6: note = L-penicillamine
  MOD_RES 7: note (S)-4-(1-(4-(2-amino-2-carboxyethyl)phenyl)-1H-1,2,3-triazo l-4-yl)-N,N,N-trimethylbutan-1-aminium
  MOD_RES 8: note = 3-(2-naphthyl)-L-alanine
  MOD_RES 9: note = 4-aminotetrahydro-2H-pyran-4-carboxylic acid
  MOD_RES 10: note = N6-acetyl-L-lysine
  MOD_RES 12: note = 3-(3-Pyridyl)-L-alanine
  MOD_RES 13: note = MeGly
  SITE 13: note = C-terminal amidyl
XNTWKXXXXKNXX

SEQ ID NO: 425 - protein, 13 aa, synthetic construct
  SITE 1: note = N-terminal acetyl
  MOD_RES 1: note = L-penicillamine
  MOD_RES 4: note = 7-methyl-L-tryptophan
  MOD_RES 5: note = N6-acetyl-L-lysine
  MOD_RES 6: note = L-penicillamine
  MOD_RES 7: note (S)-4-(1-(4-(2-amino-2-carboxyethyl)phenyl)-1H-1,2,3-triazo l-4-yl)-N,N,N-trimethylbutan-1-aminium
  MOD_RES 8: note = 3-(2-naphthyl)-L-alanine
  MOD_RES 9: note = 4-aminotetrahydro-2H-pyran-4-carboxylic acid
  MOD_RES 10: note = N6-acetyl-L-lysine
  MOD_RES 12: note = 3-(3-Pyridyl)-L-alanine
  MOD_RES 13: note = MeGly
  SITE 13: note = C-terminal amidyl
XNTWKXXXXKNXX

SEQ ID NO: 426 - protein, 13 aa, synthetic construct
  SITE 1: note = N-terminal acetyl
  MOD_RES 1: note = L-penicillamine
  MOD_RES 4: note = 7-methyl-L-tryptophan
  MOD_RES 5: note = N6-acetyl-L-lysine
  MOD_RES 6: note = L-penicillamine
  MOD_RES 7: note (S)-1-(1-(4-(2-amino-2-carboxyethyl)phenyl)-1H-1,2,3-triazo l-4-yl)-N,N,N-trimethylmethanaminium
  MOD_RES 8: note = 3-(2-naphthyl)-L-alanine
  MOD_RES 9: note = 4-aminotetrahydro-2H-pyran-4-carboxylic acid
  MOD_RES 10: note = N6-acetyl-L-lysine
  MOD_RES 12: note = 3-(3-Pyridyl)-L-alanine
  MOD_RES 13: note = MeGly
  SITE 13: note = C-terminal amidyl
XNTWKXXXXKNXX

SEQ ID NO: 427 - protein, 13 aa, synthetic construct
  SITE 1: note = N-terminal N,N,N-trimethyl-2-(2-(3-carbonylpropoxy)ethoxy)ethan-1-amin ium
  MOD_RES 1: note = L-penicillamine
  MOD_RES 4: note = 7-methyl-L-tryptophan
  MOD_RES 5: note = N6-acetyl-L-lysine
  MOD_RES 6: note = L-penicillamine
  MOD_RES 7: note (S)-5-(4-(2-amino-2-carboxyethyl)phenoxy)-N,N,N-trimethylpe ntan-1-aminium
  MOD_RES 8: note = 3-(2-naphthyl)-L-alanine
  MOD_RES 9: note = 4-aminotetrahydro-2H-pyran-4-carboxylic acid
  MOD_RES 12: note = 3-(3-Pyridyl)-L-alanine
  MOD_RES 13: note = MeGly
  SITE 13: note = C-terminal amidyl
XNTWKXXXXENXX

SEQ ID NO: 428 - protein, 13 aa, synthetic construct
  SITE 1: note = N-terminal N,N,N-trimethyl-2-(2-(3-carbonylpropoxy)ethoxy)ethan-1-amin ium
  MOD_RES 1: note = L-penicillamine
  MOD_RES 4: note = 7-methyl-L-tryptophan
  MOD_RES 5: note = N6-acetyl-L-lysine
  MOD_RES 6: note = L-penicillamine
  MOD_RES 7: note (S)-5-(4-(2-amino-2-carboxyethyl)phenoxy)-N,N,N-trimethylpe ntan-1-aminium
  MOD_RES 8: note = 3-(2-naphthyl)-L-alanine
  MOD_RES 9: note = 4-aminotetrahydro-2H-pyran-4-carboxylic acid
  MOD_RES 10: note = N6-acetyl-L-lysine
  MOD_RES 12: note = 3-(3-Pyridyl)-L-alanine
  MOD_RES 13: note = MeGly
  SITE 13: note = C-terminal amidyl
XNTWKXXXXKNXX

SEQ ID NO: 429 - protein, 14 aa, synthetic construct
  SITE 1: note = N-terminal acetyl
  SITE 1: note = D-Arginine
  MOD_RES 2: note = L-penicillamine
  MOD_RES 6: note = N6-acetyl-L-lysine
  MOD_RES 7: note = L-penicillamine
  MOD_RES 8: note (S)-4-(2-(4-(2-amino-2-carboxyethyl)phenoxy)ethyl)-4-methyl morpholin-4-ium
  MOD_RES 9: note = 3-(2-naphthyl)-L-alanine
  MOD_RES 10: note = 4-aminotetrahydro-2H-pyran-4-carboxylic acid
  MOD_RES 13: note = 3-(3-Pyridyl)-L-alanine
  MOD_RES 14: note = MeGly
  SITE 14: note = C-terminal amidyl
RXNTWKXXXXENXX

SEQ ID NO: 430 - protein, 13 aa, synthetic construct
  SITE 1: note = N-terminal acetyl
  MOD_RES 1: note = L-penicillamine
  MOD_RES 4: note = 7-methyl-L-tryptophan
  MOD_RES 5: note = N6-acetyl-L-lysine
  MOD_RES 6: note = L-penicillamine
  MOD_RES 7: note (S)-5-(4-(2-amino-2-carboxyethyl)phenoxy)-N,N,N-trimethylpe ntan-1-aminium
  MOD_RES 8: note = 3-(2-naphthyl)-L-alanine
  MOD_RES 9: note = 4-aminotetrahydro-2H-pyran-4-carboxylic acid
  MOD_RES 12: note = 3-(3-Pyridyl)-L-alanine
  MOD_RES 13: note = MeGly
  SITE 13: note = C-terminal amidyl
XNTWKXXXXENXX

SEQ ID NO: 431 - protein, 13 aa, synthetic construct
  SITE 1: note = N-terminal acetyl
  MOD_RES 1: note = L-penicillamine
  MOD_RES 4: note = 7-methyl-L-tryptophan
  MOD_RES 5: note = N6-acetyl-L-lysine
  MOD_RES 6: note = L-penicillamine
  MOD_RES 7: note (S)-4-(2-(4-(2-amino-2-carboxyethyl)phenoxy)ethyl)-4-methyl morpholin-4-ium
  MOD_RES 8: note = 3-(2-naphthyl)-L-alanine
  MOD_RES 9: note = 4-aminotetrahydro-2H-pyran-4-carboxylic acid
  MOD_RES 12: note = 3-(3-Pyridyl)-L-alanine
  MOD_RES 13: note = MeGly
  SITE 13: note = C-terminal amidyl
XNTWKXXXXENXX

SEQ ID NO: 432 - protein, 13 aa, synthetic construct
  SITE 1: note = N-terminal acetyl
  MOD_RES 1: note = L-penicillamine
  MOD_RES 4: note = 7-methyl-L-tryptophan
  MOD_RES 5: note = N6-acetyl-L-lysine
  MOD_RES 6: note = L-penicillamine
  MOD_RES 7: note (S)-4-(2-(2-(2-(4-(2-amino-2-carboxyethyl)phenoxy)ethoxy)et hoxy)ethyl)-4-methylmorpholin-4-ium
  MOD_RES 8: note = 3-(2-naphthyl)-L-alanine
  MOD_RES 9: note = 4-aminotetrahydro-2H-pyran-4-carboxylic acid
  MOD_RES 12: note = 3-(3-Pyridyl)-L-alanine
  MOD_RES 13: note = MeGly
  SITE 13: note = C-terminal amidyl
XNTWKXXXXENXX

SEQ ID NO: 433 - protein, 13 aa, synthetic construct
  SITE 1: note = N-terminal acetyl
  MOD_RES 1: note = L-penicillamine
  MOD_RES 4: note = 7-methyl-L-tryptophan
  MOD_RES 5: note = N6-acetyl-L-lysine
  MOD_RES 6: note = L-penicillamine
  MOD_RES 7: note (S)-1-(2-(2-(2-(4-(2-amino-2-carboxyethyl)phenoxy)ethoxy)et hoxy)ethyl)-1,4-dimethylpiperazin-1-ium
  MOD_RES 8: note = 3-(2-naphthyl)-L-alanine
  MOD_RES 9: note = 4-aminotetrahydro-2H-pyran-4-carboxylic acid
  MOD_RES 12: note = 3-(3-Pyridyl)-L-alanine
  MOD_RES 13: note = MeGly
  SITE 13: note = C-terminal amidyl
XNTWKXXXXENXX

SEQ ID NO: 434 - protein, 13 aa, synthetic construct
  SITE 1: note = N-terminal acetyl
  MOD_RES 1: note = L-penicillamine
  MOD_RES 4: note = 7-methyl-L-tryptophan
  MOD_RES 5: note = N6-acetyl-L-lysine
  MOD_RES 6: note = L-penicillamine
  MOD_RES 7: note (S)-1-(2-(2-(2-(4-(2-amino-2-carboxyethyl)phenoxy)ethoxy)et hoxy)ethyl)-1,4-dimethylpiperazin-1-ium
  MOD_RES 8: note = 3-(2-naphthyl)-L-alanine
  MOD_RES 9: note = 4-aminotetrahydro-2H-pyran-4-carboxylic acid
  MOD_RES 10: note = N6-acetyl-L-lysine
  MOD_RES 12: note = 3-(3-Pyridyl)-L-alanine
  MOD_RES 13: note = MeGly
  SITE 13: note = C-terminal amidyl
XNTWKXXXXKNXX

SEQ ID NO: 435 - protein, 13 aa, synthetic construct
  SITE 1: note = N-terminal acetyl
  MOD_RES 1: note = L-penicillamine
  MOD_RES 4: note = 7-methyl-L-tryptophan
  MOD_RES 5: note = N6-acetyl-L-lysine
  MOD_RES 6: note = L-penicillamine
  MOD_RES 7: note = p-Azido-L-phenylalanine
  MOD_RES 8: note = 3-(2-naphthyl)-L-alanine
  MOD_RES 9: note = 4-aminotetrahydro-2H-pyran-4-carboxylic acid
  MOD_RES 12: note = 3-(3-Pyridyl)-L-alanine
  MOD_RES 13: note = MeGly
  SITE 13: note = C-terminal amidyl
XNTWKXXXXENXX

SEQ ID NO: 436 - protein, 13 aa, synthetic construct
  SITE 1: note = N-terminal acetyl
  MOD_RES 1: note = L-penicillamine
  MOD_RES 2: note = (S)-3-amino-3-carboxy-N,N,N-trimethylpropan-1-aminium
  MOD_RES 4: note = 7-methyl-L-tryptophan
  MOD_RES 5: note = N6-acetyl-N6-methyl-L-lysine
  MOD_RES 6: note = L-penicillamine
  MOD_RES 7: note (S)-2-(2-(2-(4-(2-amino-2-carboxyethyl)phenoxy)ethoxy)ethox y)-N,N,N-trimethylethan-1-aminium
  MOD_RES 8: note = 3-(2-naphthyl)-L-alanine
  MOD_RES 9: note = 4-aminotetrahydro-2H-pyran-4-carboxylic acid
  MOD_RES 10: note = N6-acetyl-N6-methyl-L-lysine
  MOD_RES 12: note = 3-(3-Pyridyl)-L-alanine
  MOD_RES 13: note = MeGly
  SITE 13: note = C-terminal N,N-dimethylamidyl
XXTWKXXXXKNXX

SEQ ID NO: 437 - protein, 14 aa, synthetic construct
  SITE 1: note = N-terminal acetyl
  SITE 1: note = D-Arginine
  MOD_RES 2: note = L-penicillamine
  MOD_RES 5: note = 7-methyl-L-tryptophan
  MOD_RES 6: note = N6-acetyl-L-lysine
  MOD_RES 7: note = L-penicillamine
  MOD_RES 8: note (S)-4-(2-(4-(2-amino-2-carboxyethyl)phenoxy)ethyl)-4-methyl morpholin-4-ium
  MOD_RES 9: note = 3-(2-naphthyl)-L-alanine
  MOD_RES 10: note = 4-aminotetrahydro-2H-pyran-4-carboxylic acid
  MOD_RES 13: note = 3-(3-Pyridyl)-L-alanine
  MOD_RES 14: note = MeGly
  SITE 14: note = C-terminal amidyl
RXNTWKXXXXENXX

SEQ ID NO: 438 - protein, 13 aa, synthetic construct
  SITE 1: note = N-terminal N,N,N-trimethyl-2-(2-(3-carbonylpropoxy)ethoxy)ethan-1-amin ium
  MOD_RES 1: note = L-penicillamine
  MOD_RES 4: note = 7-methyl-L-tryptophan
  MOD_RES 5: note = N6-acetyl-L-lysine
  MOD_RES 6: note = L-penicillamine
  MOD_RES 7: note (S)-1-(1-(4-(2-amino-2-carboxyethyl)phenyl)-1H-1,2,3-triazo l-4-yl)-N,N,N-trimethylmethanaminium
  MOD_RES 8: note = 3-(2-naphthyl)-L-alanine
  MOD_RES 9: note = 4-aminotetrahydro-2H-pyran-4-carboxylic acid
  MOD_RES 10: note = N6-acetyl-L-lysine
  MOD_RES 12: note = 3-(3-Pyridyl)-L-alanine
  MOD_RES 13: note = MeGly
  SITE 13: note = C-terminal amidyl
XNTWKXXXXKNXX

SEQ ID NO: 439 - protein, 13 aa, synthetic construct
  SITE 1: note = N-terminal N,N,N-trimethyl-2-(2-(3-carbonylpropoxy)ethoxy)ethan-1-amin ium
  MOD_RES 1: note = L-penicillamine
  MOD_RES 4: note = 7-methyl-L-tryptophan
  MOD_RES 5: note = N6-acetyl-L-lysine
  MOD_RES 6: note = L-penicillamine
  MOD_RES 7: note (S)-4-(3-(1-(4-(2-amino-2-carboxyethyl)phenyl)-1H-1,2,3-tri azol-4-yl)propyl)-4-methylmorpholin-4-ium
  MOD_RES 8: note = 3-(2-naphthyl)-L-alanine
  MOD_RES 9: note = 4-aminotetrahydro-2H-pyran-4-carboxylic acid
  MOD_RES 10: note = N6-acetyl-L-lysine
  MOD_RES 12: note = 3-(3-Pyridyl)-L-alanine
  MOD_RES 13: note = MeGly
  SITE 13: note = C-terminal amidyl
XNTWKXXXXKNXX

SEQ ID NO: 440 - protein, 13 aa, synthetic construct
  SITE 1: note = N-terminal acetyl
  MOD_RES 1: note = L-penicillamine
  MOD_RES 4: note = 7-methyl-L-tryptophan
  MOD_RES 5: note = N6-acetyl-L-lysine
  MOD_RES 6: note = L-penicillamine
  MOD_RES 7: note (S)-4-(3-(1-(4-(2-amino-2-carboxyethyl)phenyl)-1H-1,2,3-tri azol-4-yl)propyl)-4-methylmorpholin-4-ium
  MOD_RES 8: note = 3-(2-naphthyl)-L-alanine
  MOD_RES 9: note = 4-aminotetrahydro-2H-pyran-4-carboxylic acid
  MOD_RES 10: note = N6-acetyl-L-lysine
  MOD_RES 12: note = 3-(3-Pyridyl)-L-alanine
  MOD_RES 13: note = MeGly
  SITE 13: note = C-terminal amidyl
XNTWKXXXXKNXX

SEQ ID NO: 441 - protein, 13 aa, synthetic construct
  SITE 1: note = N-terminal acetyl
  MOD_RES 1: note = L-penicillamine
  MOD_RES 4: note = 7-methyl-L-tryptophan
  MOD_RES 5: note = N6-acetyl-L-lysine
  MOD_RES 6: note = L-penicillamine
  MOD_RES 7: note (S)-1-(1-(4-(2-amino-2-carboxyethyl)phenyl)-1H-1,2,3-triazo l-4-yl)-N,N,N-trimethylmethanaminium
  MOD_RES 8: note = 3-(2-naphthyl)-L-alanine
  MOD_RES 9: note = 4-aminotetrahydro-2H-pyran-4-carboxylic acid
  MOD_RES 12: note = 3-(3-Pyridyl)-L-alanine
  MOD_RES 13: note = MeGly
  SITE 13: note = C-terminal amidyl
XNTWKXXXXENXX

SEQ ID NO: 442 - protein, 13 aa, synthetic construct
  SITE 1: note = N-terminal acetyl
  MOD_RES 1: note = L-penicillamine
  MOD_RES 4: note = 7-methyl-L-tryptophan
  MOD_RES 5: note = N6-acetyl-L-lysine
  MOD_RES 6: note = L-penicillamine
  MOD_RES 7: note (S)-4-(1-(4-(2-amino-2-carboxyethyl)phenyl)-1H-1,2,3-triazo l-4-yl)-N,N,N-trimethylbutan-1-aminium
  MOD_RES 8: note = 3-(2-naphthyl)-L-alanine
  MOD_RES 9: note = 4-aminotetrahydro-2H-pyran-4-carboxylic acid
  MOD_RES 12: note = 3-(3-Pyridyl)-L-alanine
  MOD_RES 13: note = MeGly
  SITE 13: note = C-terminal amidyl
XNTWKXXXXENXX

SEQ ID NO: 443 - protein, 13 aa, synthetic construct
  SITE 1: note = N-terminal N,N,N-trimethyl-2-(2-(3-carbonylpropoxy)ethoxy)ethan-1-amin ium
  MOD_RES 1: note = L-penicillamine
  MOD_RES 4: note (S)-3-(7-(3-acetamidophenyl)-1H-indol-3-yl)-2-aminopropanoi c acid
  MOD_RES 5: note = N6-acetyl-L-lysine
  MOD_RES 6: note = L-penicillamine
  MOD_RES 7: note = 4-(2-aminoethoxy)-L-phenylalanine
  MOD_RES 8: note = 3-(2-naphthyl)-L-alanine
  MOD_RES 9: note = 4-aminotetrahydro-2H-pyran-4-carboxylic acid
  MOD_RES 12: note = 3-(3-Pyridyl)-L-alanine
  MOD_RES 13: note = MeGly
  SITE 13: note = C-terminal amidyl
XNTXKXXXXENXX

SEQ ID NO: 444 - protein, 13 aa, synthetic construct
  SITE 1: note = N-terminal N,N,N-trimethyl-2-(2-(3-carbonylpropoxy)ethoxy)ethan-1-amin ium
  MOD_RES 1: note = L-penicillamine
  MOD_RES 4: note (S)-3-(7-(3-acetamidophenyl)-1H-indol-3-yl)-2-aminopropanoi c acid
  MOD_RES 5: note = N6-acetyl-L-lysine
  MOD_RES 6: note = L-penicillamine
  MOD_RES 7: note (S)-5-(4-(2-amino-2-carboxyethyl)phenoxy)-N,N,N-trimethylpe ntan-1-aminium
  MOD_RES 8: note = 3-(2-naphthyl)-L-alanine
  MOD_RES 9: note = 4-aminotetrahydro-2H-pyran-4-carboxylic acid
  MOD_RES 12: note = 3-(3-Pyridyl)-L-alanine
  MOD_RES 13: note = MeGly
  SITE 13: note = C-terminal amidyl
XNTXKXXXXENXX

SEQ ID NO: 445 - protein, 13 aa, synthetic construct
  SITE 1: note = N-terminal N,N,N-trimethyl-2-(2-(3-carbonylpropoxy)ethoxy)ethan-1-amin ium
  MOD_RES 1: note = L-penicillamine
  MOD_RES 4: note (S)-3-(7-(3-acetamidophenyl)-1H-indol-3-yl)-2-aminopropanoi c acid
  MOD_RES 5: note = N6-acetyl-L-lysine
  MOD_RES 6: note = L-penicillamine
  MOD_RES 7: note = 4-(2-aminoethoxy)-L-phenylalanine
  MOD_RES 8: note = 3-(2-naphthyl)-L-alanine
  MOD_RES 9: note = 4-aminotetrahydro-2H-pyran-4-carboxylic acid
  MOD_RES 10: note = N6-acetyl-L-lysine
  MOD_RES 12: note = 3-(3-Pyridyl)-L-alanine
  MOD_RES 13: note = MeGly
  SITE 13: note = C-terminal amidyl
XNTXKXXXXKNXX

SEQ ID NO: 446 - protein, 14 aa, synthetic construct
  SITE 1: note = N-terminal acetyl
  MOD_RES 1: note = (R)-5-amino-5-carboxy-N,N,N-trimethylpentan-1-aminium
  MOD_RES 2: note = L-penicillamine
  MOD_RES 5: note = 7-methyl-L-tryptophan
  MOD_RES 6: note = N6-acetyl-L-lysine
  MOD_RES 7: note = L-penicillamine
  MOD_RES 8: note (S)-5-(4-(2-amino-2-carboxyethyl)phenoxy)-N,N,N-trimethylpe ntan-1-aminium
  MOD_RES 9: note = 3-(2-naphthyl)-L-alanine
  MOD_RES 10: note = 4-aminotetrahydro-2H-pyran-4-carboxylic acid
  MOD_RES 13: note = 3-(3-Pyridyl)-L-alanine
  MOD_RES 14: note = MeGly
  SITE 14: note = C-terminal amidyl
KXNTWKXXXXENXX

SEQ ID NO: 447 - protein, 14 aa, synthetic construct
  SITE 1: note = N-terminal acetyl
  MOD_RES 1: note = (R)-5-amino-5-carboxy-N,N,N-trimethylpentan-1-aminium
  MOD_RES 2: note = L-penicillamine
  MOD_RES 5: note = 7-methyl-L-tryptophan
  MOD_RES 6: note = N6-acetyl-L-lysine
  MOD_RES 7: note = L-penicillamine
  MOD_RES 8: note = 4-(2-aminoethoxy)-L-phenylalanine
  MOD_RES 9: note = 3-(2-naphthyl)-L-alanine
  MOD_RES 10: note = 4-aminotetrahydro-2H-pyran-4-carboxylic acid
  MOD_RES 11: note = N6-acetyl-L-lysine
  MOD_RES 13: note = 3-(3-Pyridyl)-L-alanine
  MOD_RES 14: note = MeGly
  SITE 14: note = C-terminal amidyl
KXNTWKXXXXKNXX

SEQ ID NO: 448 - protein, 14 aa, synthetic construct
  SITE 1: note = N-terminal acetyl
  MOD_RES 1: note = (R)-5-amino-5-carboxy-N,N,N-trimethylpentan-1-aminium
  MOD_RES 2: note = L-penicillamine
  MOD_RES 5: note (S)-3-(7-(3-acetamidophenyl)-1H-indol-3-yl)-2-aminopropanoi c acid
  MOD_RES 6: note = N6-acetyl-L-lysine
  MOD_RES 7: note = L-penicillamine
  MOD_RES 8: note (S)-5-(4-(2-amino-2-carboxyethyl)phenoxy)-N,N,N-trimethylpe ntan-1-aminium
  MOD_RES 9: note = 3-(2-naphthyl)-L-alanine
  MOD_RES 10: note = 4-aminotetrahydro-2H-pyran-4-carboxylic acid
  MOD_RES 13: note = 3-(3-Pyridyl)-L-alanine
  MOD_RES 14: note = MeGly
  SITE 14: note = C-terminal amidyl
KXNTXKXXXXENXX

SEQ ID NO: 449 - protein, 14 aa, synthetic construct
  SITE 1: note = N-terminal acetyl
  MOD_RES 1: note = (R)-5-amino-5-carboxy-N,N,N-trimethylpentan-1-aminium
  MOD_RES 2: note = L-penicillamine
  MOD_RES 5: note (S)-3-(7-(3-acetamidophenyl)-1H-indol-3-yl)-2-aminopropanoi c acid
  MOD_RES 6: note = N6-acetyl-L-lysine
  MOD_RES 7: note = L-penicillamine
  MOD_RES 8: note = 4-(2-aminoethoxy)-L-phenylalanine
  MOD_RES 9: note = 3-(2-naphthyl)-L-alanine
  MOD_RES 10: note = 4-aminotetrahydro-2H-pyran-4-carboxylic acid
  MOD_RES 11: note = N6-acetyl-L-lysine
  MOD_RES 13: note = 3-(3-Pyridyl)-L-alanine
  MOD_RES 14: note = MeGly
  SITE 14: note = C-terminal amidyl
KXNTXKXXXXKNXX

SEQ ID NO: 450 - protein, 14 aa, synthetic construct
  SITE 1: note = N-terminal acetyl
  MOD_RES 1: note = (R)-5-amino-5-carboxy-N,N,N-trimethylpentan-1-aminium
  MOD_RES 2: note = L-penicillamine
  MOD_RES 5: note = 7-methyl-L-tryptophan
  MOD_RES 6: note = N6-acetyl-L-lysine
  MOD_RES 7: note = L-penicillamine
  MOD_RES 8: note (S)-5-(4-(2-amino-2-carboxyethyl)phenoxy)-N,N,N-trimethylpe ntan-1-aminium
  MOD_RES 9: note = 3-(2-naphthyl)-L-alanine
  MOD_RES 10: note = 4-aminotetrahydro-2H-pyran-4-carboxylic acid
  MOD_RES 11: note = N6-acetyl-L-lysine
  MOD_RES 13: note = 3-(3-Pyridyl)-L-alanine
  MOD_RES 14: note = MeGly
  SITE 14: note = C-terminal amidyl
KXNTWKXXXXKNXX

SEQ ID NO: 451 - protein, 13 aa, synthetic construct
  SITE 1: note = N-terminal acetyl
  MOD_RES 1: note = L-penicillamine
  MOD_RES 4: note (S)-3-(7-(3-acetamidophenyl)-1H-indol-3-yl)-2-aminopropanoi c acid
  MOD_RES 5: note = N6-acetyl-L-lysine
  MOD_RES 6: note = L-penicillamine
  MOD_RES 7: note (S)-5-(4-(2-amino-2-carboxyethyl)phenoxy)-N,N,N-trimethylpe ntan-1-aminium
  MOD_RES 8: note = 3-(2-naphthyl)-L-alanine
  MOD_RES 9: note = 4-aminotetrahydro-2H-pyran-4-carboxylic acid
  MOD_RES 12: note = 3-(3-Pyridyl)-L-alanine
  MOD_RES 13: note = MeGly
  SITE 13: note = C-terminal amidyl
XNTXKXXXXENXX

SEQ ID NO: 452 - protein, 13 aa, synthetic construct
  SITE 1: note = N-terminal acetyl
  MOD_RES 1: note = L-penicillamine
  MOD_RES 4: note (S)-3-(7-(3-acetamidophenyl)-1H-indol-3-yl)-2-aminopropanoi c acid
  MOD_RES 5: note = N6-acetyl-L-lysine
  MOD_RES 6: note = L-penicillamine
  MOD_RES 7: note (S)-5-(4-(2-amino-2-carboxyethyl)phenoxy)-N,N,N-trimethylpe ntan-1-aminium
  MOD_RES 8: note = 3-(2-naphthyl)-L-alanine
  MOD_RES 9: note = 4-aminotetrahydro-2H-pyran-4-carboxylic acid
  MOD_RES 10: note = N6-acetyl-L-lysine
  MOD_RES 12: note = 3-(3-Pyridyl)-L-alanine
  MOD_RES 13: note = MeGly
  SITE 13: note = C-terminal amidyl
XNTXKXXXXKNXX

SEQ ID NO: 453 - protein, 13 aa, synthetic construct
  SITE 1: note = N-terminal acetyl
  MOD_RES 1: note = L-penicillamine
  MOD_RES 4: note = 7-methyl-L-tryptophan
  MOD_RES 5: note = N6-acetyl-L-lysine
  MOD_RES 6: note = L-penicillamine
  MOD_RES 7: note (S)-4-(3-(1-(4-(2-amino-2-carboxyethyl)phenyl)-1H-1,2,3-tri azol-4-yl)propyl)-4-methylmorpholin-4-ium
  MOD_RES 8: note = 3-(2-naphthyl)-L-alanine
  MOD_RES 9: note = 4-aminotetrahydro-2H-pyran-4-carboxylic acid
  MOD_RES 12: note = 3-(3-Pyridyl)-L-alanine
  MOD_RES 13: note = MeGly
  SITE 13: note = C-terminal amidyl
XNTWKXXXXENXX

SEQ ID NO: 454 - protein, 13 aa, synthetic construct
  SITE 1: note = N-terminal acetyl
  MOD_RES 1: note = L-penicillamine
  MOD_RES 4: note = 7-methyl-L-tryptophan
  MOD_RES 5: note = N6-acetyl-L-lysine
  MOD_RES 6: note = L-penicillamine
  MOD_RES 7: note (S)-2-(1-(4-(2-amino-2-carboxyethyl)phenyl)-1H-1,2,3-triazo l-4-yl)-N,N,N-trimethylethan-1-aminium
  MOD_RES 8: note = 3-(2-naphthyl)-L-alanine
  MOD_RES 9: note = 4-aminotetrahydro-2H-pyran-4-carboxylic acid
  MOD_RES 12: note = 3-(3-Pyridyl)-L-alanine
  MOD_RES 13: note = MeGly
  SITE 13: note = C-terminal amidyl
XNTWKXXXXENXX

SEQ ID NO: 455 - protein, 13 aa, synthetic construct
  SITE 1: note = N-terminal acetyl
  MOD_RES 1: note = L-penicillamine
  MOD_RES 4: note = 7-methyl-L-tryptophan
  MOD_RES 5: note = N6-acetyl-L-lysine
  MOD_RES 6: note = L-penicillamine
  MOD_RES 7: note (S)-4-(2-(2-(2-(4-(2-amino-2-carboxyethyl)phenoxy)ethoxy)et hoxy)ethyl)-4-methylmorpholin-4-ium
  MOD_RES 8: note = 3-(2-naphthyl)-L-alanine
  MOD_RES 9: note = 4-aminotetrahydro-2H-pyran-4-carboxylic acid
  MOD_RES 10: note = N6-acetyl-L-lysine
  MOD_RES 12: note = 3-(3-Pyridyl)-L-alanine
  MOD_RES 13: note = MeGly
  SITE 13: note = C-terminal amidyl
XNTWKXXXXKNXX

SEQ ID NO: 456 - protein, 13 aa, synthetic construct
  SITE 1: note = N-terminal acetyl
  MOD_RES 1: note = L-penicillamine
  MOD_RES 4: note = 7-methyl-L-tryptophan
  MOD_RES 5: note = N6-acetyl-L-lysine
  MOD_RES 6: note = L-penicillamine
  MOD_RES 7: note (S)-8-(4-(2-amino-2-carboxyethyl)phenoxy)-N,N,N-trimethyloc tan-1-aminium
  MOD_RES 8: note = 3-(2-naphthyl)-L-alanine
  MOD_RES 9: note = 4-aminotetrahydro-2H-pyran-4-carboxylic acid
  MOD_RES 10: note = N6-acetyl-L-lysine
  MOD_RES 12: note = 3-(3-Pyridyl)-L-alanine
  MOD_RES 13: note = MeGly
  SITE 13: note = C-terminal amidyl
XNTWKXXXXKNXX

SEQ ID NO: 457 - protein, 13 aa, synthetic construct
  SITE 1: note = N-terminal acetyl
  MOD_RES 1: note = L-penicillamine
  MOD_RES 4: note = 7-methyl-L-tryptophan
  MOD_RES 5: note = N6-acetyl-L-lysine
  MOD_RES 6: note = L-penicillamine
  MOD_RES 7: note (S)-8-(4-(2-amino-2-carboxyethyl)phenoxy)-N,N,N-trimethyloc tan-1-aminium
  MOD_RES 8: note = 3-(2-naphthyl)-L-alanine
  MOD_RES 9: note = 4-aminotetrahydro-2H-pyran-4-carboxylic acid
  MOD_RES 12: note = 3-(3-Pyridyl)-L-alanine
  MOD_RES 13: note = MeGly
  SITE 13: note = C-terminal amidyl
XNTWKXXXXENXX

SEQ ID NO: 458 - protein, 13 aa, synthetic construct
  SITE 1: note = N-terminal acetyl
  MOD_RES 1: note = L-penicillamine
  MOD_RES 4: note = 7-methyl-L-tryptophan
  MOD_RES 5: note = N6-acetyl-L-lysine
  MOD_RES 6: note = L-penicillamine
  MOD_RES 7: note (S)-3-(1-(4-(2-amino-2-carboxyethyl)phenyl)-1H-1,2,3-triazo l-4-yl)-N,N,N-trimethylpropan-1-aminium
  MOD_RES 8: note = 3-(2-naphthyl)-L-alanine
  MOD_RES 9: note = 4-aminotetrahydro-2H-pyran-4-carboxylic acid
  MOD_RES 12: note = 3-(3-Pyridyl)-L-alanine
  MOD_RES 13: note = MeGly
  SITE 13: note = C-terminal amidyl
XNTWKXXXXENXX

SEQ ID NO: 459 - protein, 13 aa, synthetic construct
  SITE 1: note = N-terminal acetyl
  MOD_RES 1: note = L-penicillamine
  MOD_RES 4: note = 7-methyl-L-tryptophan
  MOD_RES 5: note = N6-acetyl-L-lysine
  MOD_RES 6: note = L-penicillamine
  MOD_RES 7: note (S)-4-((1-(4-(2-amino-2-carboxyethyl)phenyl)-1H-1,2,3-triaz ol-4-yl)methyl)-4-methylmorpholin-4-ium
  MOD_RES 8: note = 3-(2-naphthyl)-L-alanine
  MOD_RES 9: note = 4-aminotetrahydro-2H-pyran-4-carboxylic acid
  MOD_RES 12: note = 3-(3-Pyridyl)-L-alanine
  MOD_RES 13: note = MeGly
  SITE 13: note = C-terminal amidyl
XNTWKXXXXENXX

SEQ ID NO: 460 - protein, 13 aa, synthetic construct
  SITE 1: note = N-terminal acetyl
  MOD_RES 1: note = L-penicillamine
  MOD_RES 4: note = 7-methyl-L-tryptophan
  MOD_RES 5: note = N6-acetyl-L-lysine
  MOD_RES 6: note = L-penicillamine
  MOD_RES 7: note (S)-4-((1-(4-(2-amino-2-carboxyethyl)phenyl)-1H-1,2,3-triaz ol-4-yl)methyl)-4-methylmorpholin-4-ium
  MOD_RES 8: note = 3-(2-naphthyl)-L-alanine
  MOD_RES 9: note = 4-aminotetrahydro-2H-pyran-4-carboxylic acid
  MOD_RES 11: note = N6-acetyl-L-lysine
  MOD_RES 12: note = 3-(3-Pyridyl)-L-alanine
  MOD_RES 13: note = MeGly
  SITE 13: note = C-terminal amidyl
XNTWKXXXXEKXX

SEQ ID NO: 461 - protein, 14 aa, synthetic construct
  SITE 1: note = N-terminal acetyl
  MOD_RES 1: note = (R)-5-amino-5-carboxy-N,N,N-trimethylpentan-1-aminium
  MOD_RES 2: note = L-penicillamine
  MOD_RES 5: note (S)-3-(7-(3-acetamidophenyl)-1H-indol-3-yl)-2-aminopropanoi c acid
  MOD_RES 6: note = N6-acetyl-L-lysine
  MOD_RES 7: note = L-penicillamine
  MOD_RES 8: note = 4-(2-aminoethoxy)-L-phenylalanine
  MOD_RES 9: note = 3-(2-naphthyl)-L-alanine
  MOD_RES 10: note = 4-aminotetrahydro-2H-pyran-4-carboxylic acid
  MOD_RES 13: note = 3-(3-Pyridyl)-L-alanine
  MOD_RES 14: note = MeGly
  SITE 14: note = C-terminal amidyl
KXNTXKXXXXENXX

SEQ ID NO: 462 - protein, 14 aa, synthetic construct
  SITE 1: note = N-terminal acetyl
  SITE 1: note = D-Arginine
  MOD_RES 2: note = L-penicillamine
  MOD_RES 5: note = 7-methyl-L-tryptophan
  MOD_RES 6: note = N6-acetyl-L-lysine
  MOD_RES 7: note = L-penicillamine
  MOD_RES 8: note (S)-5-(4-(2-amino-2-carboxyethyl)phenoxy)-N,N,N-trimethylpe ntan-1-aminium
  MOD_RES 9: note = 3-(2-naphthyl)-L-alanine
  MOD_RES 10: note = 4-aminotetrahydro-2H-pyran-4-carboxylic acid
  MOD_RES 13: note = 3-(3-Pyridyl)-L-alanine
  MOD_RES 14: note = MeGly
  SITE 14: note = C-terminal amidyl
RXNTWKXXXXENXX

SEQ ID NO: 463 - protein, 13 aa, synthetic construct
  SITE 1: note = N-terminal N,N,N-trimethyl-2-(2-(3-carbonylpropoxy)ethoxy)ethan-1-amin ium
  MOD_RES 1: note = L-penicillamine
  MOD_RES 4: note = 7-methyl-L-tryptophan
  MOD_RES 6: note = L-penicillamine
  MOD_RES 7: note (S)-2-(2-(2-(4-(2-amino-2-carboxyethyl)phenoxy)ethoxy)ethox y)-N,N,N-trimethylethan-1-aminium
  MOD_RES 8: note = 3-(2-naphthyl)-L-alanine
  MOD_RES 10: note = N6-acetyl-N6-methyl-L-lysine
  MOD_RES 12: note = 3-(3-Pyridyl)-L-alanine
  MOD_RES 13: note = MeGly
  SITE 13: note = C-terminal N,N-dimethylamidyl
XLTWLXXXLXNXX

SEQ ID NO: 464 - protein, 13 aa, synthetic construct
  SITE 1: note = N-terminal N,N,N-trimethyl-2-(2-(3-carbonylpropoxy)ethoxy)ethan-1-amin ium
  MOD_RES 1: note = L-penicillamine
  MOD_RES 4: note = 7-methyl-L-tryptophan
  MOD_RES 6: note = L-penicillamine
  MOD_RES 7: note (S)-2-(2-(2-(4-(2-amino-2-carboxyethyl)phenoxy)ethoxy)ethox y)-N,N,N-trimethylethan-1-aminium
  MOD_RES 8: note = 3-(2-naphthyl)-L-alanine
  MOD_RES 10: note = N6-acetyl-N6-methyl-L-lysine
  MOD_RES 12: note = 3-(3-Pyridyl)-L-alanine
  MOD_RES 13: note = MeGly
  SITE 13: note = C-terminal N,N-dimethylamidyl
XFTWFXXXFXNXX

SEQ ID NO: 465 - protein, 13 aa, synthetic construct
  SITE 1: note = N-terminal N,N,N-trimethyl-2-(2-(3-carbonylpropoxy)ethoxy)ethan-1-amin ium
  MOD_RES 1: note = L-penicillamine
  MOD_RES 4: note = 7-methyl-L-tryptophan
  MOD_RES 6: note = L-penicillamine
  MOD_RES 7: note (S)-2-(2-(2-(4-(2-amino-2-carboxyethyl)phenoxy)ethoxy)ethox y)-N,N,N-trimethylethan-1-aminium
  MOD_RES 8: note = 3-(2-naphthyl)-L-alanine
  MOD_RES 10: note = N6-acetyl-N6-methyl-L-lysine
  MOD_RES 12: note = 3-(3-Pyridyl)-L-alanine
  MOD_RES 13: note = MeGly
  SITE 13: note = C-terminal N,N-dimethylamidyl
XWTWWXXXWXNXX

SEQ ID NO: 466 - protein, 13 aa, synthetic construct
  SITE 1: note = N-terminal N,N,N-trimethyl-2-(2-(3-carbonylpropoxy)ethoxy)ethan-1-amin ium
  MOD_RES 1: note = L-penicillamine
  MOD_RES 2: note = N4,N4-dimethyl-L-asparagine
  MOD_RES 4: note = 7-methyl-L-tryptophan
  MOD_RES 5: note = N6-acetyl-N6-methyl-L-lysine
  MOD_RES 6: note = L-penicillamine
  MOD_RES 7: note (S)-2-(2-(2-(4-(2-amino-2-carboxyethyl)phenoxy)ethoxy)ethox y)-N,N,N-trimethylethan-1-aminium
  MOD_RES 8: note = 3-(2-naphthyl)-L-alanine
  MOD_RES 9: note = 4-aminotetrahydro-2H-pyran-4-carboxylic acid
  MOD_RES 12: note = 3-(3-Pyridyl)-L-alanine
  MOD_RES 13: note = MeGly
  SITE 13: note = C-terminal N,N-dimethylamidyl
XNTWXXXXXANXX

SEQ ID NO: 467 - protein, 13 aa, synthetic construct
  SITE 1: note = N-terminal N,N,N-trimethyl-2-(2-(3-carbonylpropoxy)ethoxy)ethan-1-amin ium
  MOD_RES 1: note = L-penicillamine
  MOD_RES 2: note = N4,N4-dimethyl-L-asparagine
  MOD_RES 4: note = 7-methyl-L-tryptophan
  MOD_RES 5: note = N6-acetyl-N6-methyl-L-lysine
  MOD_RES 6: note = L-penicillamine
  MOD_RES 7: note (S)-2-(2-(2-(4-(2-amino-2-carboxyethyl)phenoxy)ethoxy)ethox y)-N,N,N-trimethylethan-1-aminium
  MOD_RES 8: note = 3-(2-naphthyl)-L-alanine
  MOD_RES 9: note = 4-aminotetrahydro-2H-pyran-4-carboxylic acid
  MOD_RES 12: note = 3-(3-Pyridyl)-L-alanine
  MOD_RES 13: note = MeGly
  SITE 13: note = C-terminal N,N-dimethylamidyl
XNTWXXXXXLNXX

SEQ ID NO: 468 - protein, 13 aa, synthetic construct
  SITE 1: note = N-terminal N,N,N-trimethyl-2-(2-(3-carbonylpropoxy)ethoxy)ethan-1-amin ium
  MOD_RES 1: note = L-penicillamine
  MOD_RES 4: note = 7-methyl-L-tryptophan
  MOD_RES 6: note = L-penicillamine
  MOD_RES 7: note (S)-2-(2-(2-(4-(2-amino-2-carboxyethyl)phenoxy)ethoxy)ethox y)-N,N,N-trimethylethan-1-aminium
  MOD_RES 8: note = 3-(2-naphthyl)-L-alanine
  MOD_RES 10: note = N6-acetyl-N6-methyl-L-lysine
  MOD_RES 12: note = 3-(3-Pyridyl)-L-alanine
  MOD_RES 13: note = MeGly
  SITE 13: note = C-terminal N,N-dimethylamidyl
XATWAXXXAXNXX

SEQ ID NO: 469 - protein, 13 aa, synthetic construct
  SITE 1: note = N-terminal N,N,N-trimethyl-2-(2-(3-carbonylpropoxy)ethoxy)ethan-1-amin ium
  MOD_RES 1: note = L-penicillamine
  MOD_RES 2: note = N4,N4-dimethyl-L-asparagine
  MOD_RES 4: note = 7-methyl-L-tryptophan
  MOD_RES 5: note = N6-acetyl-N6-methyl-L-lysine
  MOD_RES 6: note = L-penicillamine
  MOD_RES 7: note (S)-2-(2-(2-(4-(2-amino-2-carboxyethyl)phenoxy)ethoxy)ethox y)-N,N,N-trimethylethan-1-aminium
  MOD_RES 8: note = 3-(2-naphthyl)-L-alanine
  MOD_RES 9: note = 4-aminotetrahydro-2H-pyran-4-carboxylic acid
  MOD_RES 12: note = 3-(3-Pyridyl)-L-alanine
  MOD_RES 13: note = MeGly
  SITE 13: note = C-terminal N,N-dimethylamidyl
XNTWXXXXXFNXX

SEQ ID NO: 470 - protein, 13 aa, synthetic construct
  SITE 1: note = N-terminal N,N,N-trimethyl-2-(2-(3-carbonylpropoxy)ethoxy)ethan-1-amin ium
  MOD_RES 1: note = L-penicillamine
  MOD_RES 2: note = N4,N4-dimethyl-L-asparagine
  MOD_RES 4: note = 7-methyl-L-tryptophan
  MOD_RES 5: note = N6-acetyl-N6-methyl-L-lysine
  MOD_RES 6: note = L-penicillamine
  MOD_RES 7: note (S)-2-(2-(2-(4-(2-amino-2-carboxyethyl)phenoxy)ethoxy)ethox y)-N,N,N-trimethylethan-1-aminium
  MOD_RES 8: note = 3-(2-naphthyl)-L-alanine
  MOD_RES 9: note = 4-aminotetrahydro-2H-pyran-4-carboxylic acid
  MOD_RES 12: note = 3-(3-Pyridyl)-L-alanine
  MOD_RES 13: note = MeGly
  SITE 13: note = C-terminal N,N-dimethylamidyl
XNTWXXXXXWNXX

SEQ ID NO: 471 - protein, 13 aa, synthetic construct
  SITE 1: note = N-terminal N,N,N-trimethyl-2-(2-(3-carbonylpropoxy)ethoxy)ethan-1-amin ium
  MOD_RES 1: note = L-penicillamine
  MOD_RES 4: note = 7-methyl-L-tryptophan
  MOD_RES 5: note = N6-acetyl-L-lysine
  MOD_RES 6: note = L-penicillamine
  MOD_RES 7: note = 4-(2-aminoethoxy)-L-phenylalanine(G)
  MOD_RES 8: note = 3-(2-naphthyl)-L-alanine
  MOD_RES 9: note = 4-aminotetrahydro-2H-pyran-4-carboxylic acid
  MOD_RES 10: note = N6-acetyl-L-lysine
  MOD_RES 12: note = 3-(3-Pyridyl)-L-alanine
  MOD_RES 13: note = MeGly
  SITE 13: note = C-terminal amidyl
XNTWKXXXXKNXX

SEQ ID NO: 472 - protein, 13 aa, synthetic construct
  SITE 1: note = N-terminal N,N,N-trimethyl-2-(2-(3-carbonylpropoxy)ethoxy)ethan-1-amin ium
  MOD_RES 1: note = L-penicillamine
  MOD_RES 2: note = N4,N4-dimethyl-L-asparagine
  MOD_RES 4: note = 7-methyl-L-tryptophan
  MOD_RES 5: note = N6-acetyl-N6-methyl-L-lysine
  MOD_RES 6: note = L-penicillamine
  MOD_RES 7: note (S)-4-(1-(2-(4-(2-amino-2-carboxyethyl)phenoxy)ethyl)-1H-1, 2,3-triazol-4-yl)-N,N,N-trimethylbutan-1-aminium
  MOD_RES 8: note = 3-(2-naphthyl)-L-alanine
  MOD_RES 9: note = 4-aminotetrahydro-2H-pyran-4-carboxylic acid
  MOD_RES 10: note = N6-acetyl-N6-methyl-L-lysine
  MOD_RES 12: note = 3-(3-Pyridyl)-L-alanine
  MOD_RES 13: note = MeGly
  SITE 13: note = C-terminal N,N-dimethylamidyl
XNTWXXXXXXNXX

SEQ ID NO: 473 - protein, 14 aa, synthetic construct
  SITE 1: note = N-terminal N,N,N-trimethyl-2-(2-(3-carbonylpropoxy)ethoxy)ethan-1-amin ium
  SITE 1: note = D-Arginine
  MOD_RES 2: note = L-penicillamine
  MOD_RES 5: note = 7-methyl-L-tryptophan
  MOD_RES 6: note = N6-acetyl-L-lysine
  MOD_RES 7: note = L-penicillamine
  MOD_RES 8: note = 4-(2-aminoethoxy)-L-phenylalanine
  MOD_RES 9: note = 3-(2-naphthyl)-L-alanine
  MOD_RES 10: note = 4-aminotetrahydro-2H-pyran-4-carboxylic acid
  MOD_RES 13: note = (S)-2-amino-3-(5-methylpyridin-3-yl)propanoic acid
  MOD_RES 14: note = MeGly
  SITE 14: note = C-terminal amidyl
RXNTWKXXXXENXX

SEQ ID NO: 474 - protein, 14 aa, synthetic construct
  SITE 1: note = N-terminal acetyl
  MOD_RES 1: note = (R)-5-amino-5-carboxy-N,N,N-trimethylpentan-1-aminium
  MOD_RES 2: note = L-penicillamine
  MOD_RES 5: note = 7-methyl-L-tryptophan
  MOD_RES 6: note = N6-acetyl-L-lysine
  MOD_RES 7: note = L-penicillamine
  MOD_RES 8: note = 4-(2-aminoethoxy)-L-phenylalanine
  MOD_RES 9: note = 3-(2-naphthyl)-L-alanine
  MOD_RES 10: note = 4-aminotetrahydro-2H-pyran-4-carboxylic acid
  MOD_RES 13: note = (S)-2-amino-3-(5-methylpyridin-3-yl)propanoic acid
  MOD_RES 14: note = MeGly
  SITE 14: note = C-terminal amidyl
KXNTWKXXXXENXX

SEQ ID NO: 475 - protein, 13 aa, synthetic construct
  SITE 13: note = C-terminal N,N-dimethylamidyl
  MOD_RES 1: note = Abu
  MOD_RES 2: note = N4,N4-dimethyl-L-asparagine
  MOD_RES 4: note = 7-methyl-L-tryptophan
  MOD_RES 5: note = N6-acetyl-N6-methyl-L-lysine
  MOD_RES 7: note (S)-2-(2-(2-(4-(2-amino-2-carboxyethyl)phenoxy)ethoxy)ethox y)-N,N,N-trimethylethan-1-aminium
  MOD_RES 8: note = 3-(2-naphthyl)-L-alanine
  MOD_RES 9: note = 4-aminotetrahydro-2H-pyran-4-carboxylic acid
  MOD_RES 10: note = N6-acetyl-N6-methyl-L-lysine
  MOD_RES 13: note = MeGly
  SITE 1: note = N-terminal N,N,N-trimethyl-2-(2-(3-carbonylpropoxy)ethoxy)ethan-1-amin ium
XNTWXCXXXXNFX

SEQ ID NO: 476 - protein, 13 aa, synthetic construct
  SITE 13: note = C-terminal N,N-dimethylamidyl
  MOD_RES 1: note = Abu
  MOD_RES 2: note = N4,N4-dimethyl-L-asparagine
  MOD_RES 4: note = 7-methyl-L-tryptophan
  MOD_RES 5: note = N6-acetyl-N6-methyl-L-lysine
  MOD_RES 7: note (S)-2-(2-(2-(4-(2-amino-2-carboxyethyl)phenoxy)ethoxy)ethox y)-N,N,N-trimethylethan-1-aminium
  MOD_RES 8: note = 3-(2-naphthyl)-L-alanine
  MOD_RES 9: note = 4-aminotetrahydro-2H-pyran-4-carboxylic acid
  MOD_RES 10: note = N6-acetyl-N6-methyl-L-lysine
  MOD_RES 13: note = MeGly
  SITE 1: note = N-terminal N,N,N-trimethyl-2-(2-(3-carbonylpropoxy)ethoxy)ethan-1-amin ium
XNTWXCXXXXNAX

SEQ ID NO: 477 - protein, 13 aa, synthetic construct
  SITE 13: note = C-terminal amidyl
  MOD_RES 1: note = Abu
  MOD_RES 4: note (S)-3-(7-(3-acetamidophenyl)-1H-indol-3-yl)-2-aminopropanoi c acid
  MOD_RES 5: note = N6-acetyl-L-lysine
  MOD_RES 6: note = 2-methyl-cysteine
  MOD_RES 7: note (S)-5-(4-(2-amino-2-carboxyethyl)phenoxy)-N,N,N-trimethylpe ntan-1-aminium
  MOD_RES 8: note = 3-(2-naphthyl)-L-alanine
  MOD_RES 9: note = 4-aminotetrahydro-2H-pyran-4-carboxylic acid
  MOD_RES 10: note = N6-acetyl-L-lysine
  MOD_RES 12: note = 3-(3-Pyridyl)-L-alanine
  MOD_RES 13: note = MeGly
  SITE 1: note = N-terminal acetyl
XNTXKXXXXXNXX

SEQ ID NO: 478 - protein, 13 aa, synthetic construct
  SITE 13: note = C-terminal amidyl
  MOD_RES 4: note = 7-methyl-L-tryptophan
  MOD_RES 5: note = N6-acetyl-L-lysine
  MOD_RES 6: note = 2-methyl-cysteine
  MOD_RES 7: note (S)-5-(4-(2-amino-2-carboxyethyl)phenoxy)-N,N,N-trimethylpe ntan-1-aminium
  MOD_RES 8: note = 3-(2-naphthyl)-L-alanine
  MOD_RES 9: note = 4-aminotetrahydro-2H-pyran-4-carboxylic acid
  MOD_RES 10: note = N6-acetyl-L-lysine
  MOD_RES 12: note = 3-(3-Pyridyl)-L-alanine
  MOD_RES 13: note = MeGly
  SITE 1: note = N-terminal acetyl
CNTWXXXXXKNXX

SEQ ID NO: 479 - protein, 13 aa, synthetic construct
  SITE 13: note = C-terminal N,N-dimethylamidyl
  MOD_RES 1: note = L-penicillamine
  MOD_RES 2: note = N4,N4-dimethyl-L-asparagine
  MOD_RES 4: note = 7-methyl-L-tryptophan
  MOD_RES 5: note = N6-acetyl-N6-methyl-L-lysine
  MOD_RES 6: note = L-penicillamine
  MOD_RES 7: note (S)-4-(7-(1-(4-(2-amino-2-carboxyethyl)phenyl)-1H-1,2,3-tri azol-4-yl)heptyl)-4-methylmorpholin-4-ium
  MOD_RES 8: note = 3-(2-naphthyl)-L-alanine
  MOD_RES 9: note = 4-aminotetrahydro-2H-pyran-4-carboxylic acid
  MOD_RES 10: note = N6-acetyl-N6-methyl-L-lysine
  MOD_RES 12: note = 3-(3-Pyridyl)-L-alanine
  MOD_RES 13: note = MeGly
  SITE 1: note = N-terminal N,N,N-trimethyl-2-(2-(3-carbonylpropoxy)ethoxy)ethan-1-amin ium
XNTWXXXXXXNXX

SEQ ID NO: 480 - protein, 14 aa, synthetic construct
  SITE 14: note = C-terminal amidyl
  MOD_RES 1: note = (R)-5-amino-5-carboxy-N,N,N-trimethylpentan-1-aminium
  MOD_RES 2: note = L-penicillamine
  MOD_RES 5: note (S)-3-(7-(3-acetamidophenyl)-1H-indol-3-yl)-2-aminopropanoi c acid
  MOD_RES 6: note = N6-acetyl-L-lysine
  MOD_RES 7: note = L-penicillamine
  MOD_RES 8: note = 4-(2-aminoethoxy)-L-phenylalanine(G)
  MOD_RES 9: note = 3-(2-naphthyl)-L-alanine
  MOD_RES 10: note = 4-aminotetrahydro-2H-pyran-4-carboxylic acid
  MOD_RES 13: note = (S)-2-amino-3-(5-methylpyridin-3-yl)propanoic acid
  MOD_RES 14: note = MeGly
  SITE 1: note = N-terminal acetyl
KXNTXKXXXXENXX

SEQ ID NO: 481 - protein, 13 aa, synthetic construct
  SITE 13: note = C-terminal amidyl
  MOD_RES 1: note = L-penicillamine
  MOD_RES 4: note (S)-3-(7-(3-acetamidophenyl)-1H-indol-3-yl)-2-aminopropanoi c acid
  MOD_RES 5: note = N6-acetyl-L-lysine
  MOD_RES 6: note = L-penicillamine
  MOD_RES 7: note = 4-(2-aminoethoxy)-L-phenylalanine(G)
  MOD_RES 8: note = 3-(2-naphthyl)-L-alanine
  MOD_RES 9: note = 4-aminotetrahydro-2H-pyran-4-carboxylic acid
  MOD_RES 10: note = N6-acetyl-N6-methyl-L-lysine
  MOD_RES 12: note = (S)-2-amino-3-(5-methylpyridin-3-yl)propanoic acid
  MOD_RES 13: note = MeGly
  SITE 1: note = N-terminal acetyl
XNTXKXXXXXNXX

SEQ ID NO: 482 - protein, 13 aa, synthetic construct
  SITE 1: note = N-terminal acetyl
  MOD_RES 1: note = L-penicillamine
  MOD_RES 4: note (S)-3-(7-(3-acetamidophenyl)-1H-indol-3-yl)-2-aminopropanoi c acid
  MOD_RES 5: note = N6-acetyl-L-lysine
  MOD_RES 6: note = L-penicillamine
  MOD_RES 7: note = 4-(2-aminoethoxy)-L-phenylalanine(G)
  MOD_RES 8: note = 3-(2-naphthyl)-L-alanine
  MOD_RES 9: note = 4-aminotetrahydro-2H-pyran-4-carboxylic acid
  MOD_RES 10: note = N6-acetyl-N6-methyl-L-lysine
  MOD_RES 12: note = (S)-2-amino-3-(5-methylpyridin-3-yl)propanoic acid
  MOD_RES 13: note = MeGly
  SITE 13: note = C-terminal amidyl
XNTXKXXXXXNXX

SEQ ID NO: 483 - protein, 13 aa, synthetic construct
  SITE 13: note = C-terminal N,N-dimethylamidyl
  MOD_RES 2: note = N4,N4-dimethyl-L-asparagine
  MOD_RES 4: note = 7-methyl-L-tryptophan
  MOD_RES 5: note = N6-acetyl-N6-methyl-L-lysine
  MOD_RES 7: note (S)-5-(4-(2-amino-2-carboxyethyl)phenoxy)-N,N,N-trimethylpe ntan-1-aminium
  MOD_RES 8: note = 3-(2-naphthyl)-L-alanine
  MOD_RES 9: note = 4-aminotetrahydro-2H-pyran-4-carboxylic acid
  MOD_RES 10: note = N6-acetyl-N6-methyl-L-lysine
  MOD_RES 12: note = 3-(3-Pyridyl)-L-alanine
  MOD_RES 13: note = MeGly
  SITE 1: note = N-terminal N,N,N-trimethyl-2-(2-(3-carbonylpropoxy)ethoxy)ethan-1-amin ium
CXTXXCXXXXNXX

SEQ ID NO: 484 - protein, 13 aa, synthetic construct
  SITE 13: note = C-terminal N,N-dimethylamidyl
  MOD_RES 2: note = N4,N4-dimethyl-L-asparagine
  MOD_RES 4: note = 7-methyl-L-tryptophan
  MOD_RES 5: note = N6-acetyl-N6-methyl-L-lysine
  MOD_RES 6: note = L-penicillamine
  MOD_RES 7: note (S)-5-(4-(2-amino-2-carboxyethyl)phenoxy)-N,N,N-trimethylpe ntan-1-aminium
  MOD_RES 8: note = 3-(2-naphthyl)-L-alanine
  MOD_RES 9: note = 4-aminotetrahydro-2H-pyran-4-carboxylic acid
  MOD_RES 10: note = N6-acetyl-N6-methyl-L-lysine
  MOD_RES 12: note = 3-(3-Pyridyl)-L-alanine
  MOD_RES 13: note = MeGly
  SITE 1: note = N-terminal N,N,N-trimethyl-2-(2-(3-carbonylpropoxy)ethoxy)ethan-1-amin ium
CNTWXXXXXXNXX

SEQ ID NO: 485-486 - skipped (2 entries)

SEQ ID NO: 487 - protein, 13 aa, synthetic construct
  SITE 13: note = C-terminal N,N-dimethylamidyl
  MOD_RES 1: note = L-penicillamine
  MOD_RES 2: note = N4,N4-dimethyl-L-asparagine
  MOD_RES 4: note = 7-methyl-L-tryptophan
  MOD_RES 5: note = N6-acetyl-N6-methyl-L-lysine
  MOD_RES 6: note = L-penicillamine
  MOD_RES 7: note (S)-5-(4-(2-amino-2-carboxyethyl)phenoxy)-N,N,N-trimethylpe ntan-1-aminium
  MOD_RES 8: note = 3-(2-naphthyl)-L-alanine
  MOD_RES 10: note = N6-acetyl-N6-methyl-L-lysine
  MOD_RES 12: note = 3-(3-Pyridyl)-L-alanine
  MOD_RES 13: note = MeGly
  SITE 1: note = N-terminal N,N,N-trimethyl-2-(2-(3-carbonylpropoxy)ethoxy)ethan-1-amin ium
XNTWXXXXLXNXX

SEQ ID NO: 488 - protein, 13 aa, synthetic construct
  SITE 13: note = C-terminal N,N-dimethylamidyl
  MOD_RES 1: note = L-penicillamine
  MOD_RES 2: note = N4,N4-dimethyl-L-asparagine
  MOD_RES 4: note = 7-methyl-L-tryptophan
  MOD_RES 5: note = N6-acetyl-N6-methyl-L-lysine
  MOD_RES 6: note = L-penicillamine
  MOD_RES 7: note (S)-5-(4-(2-amino-2-carboxyethyl)phenoxy)-N,N,N-trimethylpe ntan-1-aminium
  MOD_RES 8: note = 3-(2-naphthyl)-L-alanine
  MOD_RES 10: note = N6-acetyl-N6-methyl-L-lysine
  MOD_RES 12: note = 3-(3-Pyridyl)-L-alanine
  MOD_RES 13: note = MeGly
  SITE 1: note = N-terminal N,N,N-trimethyl-2-(2-(3-carbonylpropoxy)ethoxy)ethan-1-amin ium
XNTWXXXXAXNXX

SEQ ID NO: 489 - protein, 13 aa, synthetic construct
  SITE 13: note = C-terminal N,N-dimethylamidyl
  MOD_RES 1: note = L-penicillamine
  MOD_RES 2: note = N4,N4-dimethyl-L-asparagine
  MOD_RES 4: note = 7-methyl-L-tryptophan
  MOD_RES 6: note = L-penicillamine
  MOD_RES 7: note (S)-5-(4-(2-amino-2-carboxyethyl)phenoxy)-N,N,N-trimethylpe ntan-1-aminium
  MOD_RES 8: note = 3-(2-naphthyl)-L-alanine
  MOD_RES 9: note = 4-aminotetrahydro-2H-pyran-4-carboxylic acid
  MOD_RES 10: note = N6-acetyl-N6-methyl-L-lysine
  MOD_RES 12: note = 3-(3-Pyridyl)-L-alanine
  MOD_RES 13: note = MeGly
  SITE 1: note = N-terminal N,N,N-trimethyl-2-(2-(3-carbonylpropoxy)ethoxy)ethan-1-amin ium
XNTWLXXXXXNXX

SEQ ID NO: 490 - protein, 13 aa, synthetic construct
  SITE 13: note = C-terminal amidyl
  MOD_RES 1: note = L-penicillamine
  MOD_RES 4: note = 7-methyl-L-tryptophan
  MOD_RES 5: note = N6-acetyl-L-lysine
  MOD_RES 6: note = L-penicillamine
  MOD_RES 7: note (S)-5-(4-(2-amino-2-carboxyethyl)phenoxy)-N,N,N-trimethylpe ntan-1-aminium
  MOD_RES 8: note = 3-(2-naphthyl)-L-alanine
  MOD_RES 9: note = 4-aminotetrahydro-2H-pyran-4-carboxylic acid
  MOD_RES 10: note = N6-acetyl-L-lysine
  MOD_RES 12: note = 3-(3-Pyridyl)-L-alanine
  MOD_RES 13: note = MeGly
  SITE 1: note = N-terminal 1-((3-carboxy-2',4'-difluoro-[1,1'-biphenyl]-4-yl)oxy)-2,11 -dioxo-6,9,15,18-tetraoxa-3,12-diazaicosan-20-oyl
XNTWKXXXXKNXX

SEQ ID NO: 491 - protein, 13 aa, synthetic construct
  SITE 13: note = C-terminal amidyl
  MOD_RES 1: note = L-penicillamine
  MOD_RES 4: note = 7-methyl-L-tryptophan
  MOD_RES 5: note = N6-acetyl-L-lysine
  MOD_RES 6: note = L-penicillamine
  MOD_RES 7: note (S)-5-(4-(2-amino-2-carboxyethyl)phenoxy)-N,N,N-trimethylpe ntan-1-aminium
  MOD_RES 8: note = 3-(2-naphthyl)-L-alanine
  MOD_RES 9: note = 4-aminotetrahydro-2H-pyran-4-carboxylic acid
  MOD_RES 10: note = N6-acetyl-L-lysine
  MOD_RES 12: note = 3-(3-Pyridyl)-L-alanine
  MOD_RES 13: note = MeGly
  SITE 1: note = N-terminal 22-(4-iodophenyl)-10,19-dioxo-3,6,12,15-tetraoxa-9,18-diaza docosanoyl
XNTWKXXXXKNXX

SEQ ID NO: 492 - protein, 13 aa, synthetic construct
  SITE 13: note = C-terminal N,N-dimethylamidyl
  MOD_RES 1: note = L-penicillamine
  MOD_RES 2: note = N4,N4-dimethyl-L-asparagine
  MOD_RES 4: note = 7-methyl-L-tryptophan
  MOD_RES 6: note = L-penicillamine
  MOD_RES 7: note (S)-5-(4-(2-amino-2-carboxyethyl)phenoxy)-N,N,N-trimethylpe ntan-1-aminium
  MOD_RES 8: note = 3-(2-naphthyl)-L-alanine
  MOD_RES 9: note = 4-aminotetrahydro-2H-pyran-4-carboxylic acid
  MOD_RES 10: note = N6-acetyl-N6-methyl-L-lysine
  MOD_RES 12: note = 3-(3-Pyridyl)-L-alanine
  MOD_RES 13: note = MeGly
  SITE 1: note = N-terminal N,N,N-trimethyl-2-(2-(3-carbonylpropoxy)ethoxy)ethan-1-amin ium
XNTWAXXXXXNXX

SEQ ID NO: 493 - protein, 13 aa, synthetic construct
  SITE 13: note = C-terminal N,N-dimethylamidyl
  MOD_RES 1: note = L-penicillamine
  MOD_RES 2: note = N4,N4-dimethyl-L-asparagine
  MOD_RES 4: note = 7-methyl-L-tryptophan
  MOD_RES 5: note = N6-acetyl-N6-methyl-L-lysine
  MOD_RES 6: note = L-penicillamine
  MOD_RES 7: note (S)-5-(4-(2-amino-2-carboxyethyl)phenoxy)-N,N,N-trimethylpe ntan-1-aminium
  MOD_RES 8: note = 3-(2-naphthyl)-L-alanine
  MOD_RES 9: note = 4-aminotetrahydro-2H-pyran-4-carboxylic acid
  MOD_RES 10: note = N6-acetyl-N6-methyl-L-lysine
  MOD_RES 12: note = 3-(3-Pyridyl)-L-alanine
  MOD_RES 13: note = MeGly
  SITE 1: note = N-terminal N,N,N-trimethyl-2-(2-(3-carbonylpropoxy)ethoxy)ethan-1-amin ium
XNLWXXXXXXNXX

SEQ ID NO: 494 - protein, 13 aa, synthetic construct
  SITE 13: note = C-terminal N,N-dimethylamidyl
  MOD_RES 1: note = L-penicillamine
  MOD_RES 2: note = N4,N4-dimethyl-L-asparagine
  MOD_RES 4: note = 7-methyl-L-tryptophan
  MOD_RES 5: note = N6-acetyl-N6-methyl-L-lysine
  MOD_RES 6: note = L-penicillamine
  MOD_RES 7: note (S)-5-(4-(2-amino-2-carboxyethyl)phenoxy)-N,N,N-trimethylpe ntan-1-aminium
  MOD_RES 8: note = 3-(2-naphthyl)-L-alanine
  MOD_RES 9: note = 4-aminotetrahydro-2H-pyran-4-carboxylic acid
  MOD_RES 10: note = N6-acetyl-N6-methyl-L-lysine
  MOD_RES 12: note = 3-(3-Pyridyl)-L-alanine
  MOD_RES 13: note = MeGly
  SITE 1: note = N-terminal N,N,N-trimethyl-2-(2-(3-carbonylpropoxy)ethoxy)ethan-1-amin ium
XNAWXXXXXXNXX

SEQ ID NO: 495 - protein, 13 aa, synthetic construct
  SITE 13: note = C-terminal N,N-dimethylamidyl
  MOD_RES 1: note = L-penicillamine
  MOD_RES 4: note = 7-methyl-L-tryptophan
  MOD_RES 5: note = N6-acetyl-N6-methyl-L-lysine
  MOD_RES 6: note = L-penicillamine
  MOD_RES 7: note (S)-5-(4-(2-amino-2-carboxyethyl)phenoxy)-N,N,N-trimethylpe ntan-1-aminium
  MOD_RES 8: note = 3-(2-naphthyl)-L-alanine
  MOD_RES 9: note = 4-aminotetrahydro-2H-pyran-4-carboxylic acid
  MOD_RES 10: note = N6-acetyl-N6-methyl-L-lysine
  MOD_RES 12: note = 3-(3-Pyridyl)-L-alanine
  MOD_RES 13: note = MeGly
  SITE 1: note = N-terminal N,N,N-trimethyl-2-(2-(3-carbonylpropoxy)ethoxy)ethan-1-amin ium
XLTWXXXXXXNXX

SEQ ID NO: 496 - protein, 13 aa, synthetic construct
  SITE 13: note = C-terminal N,N-dimethylamidyl
  MOD_RES 1: note = L-penicillamine
  MOD_RES 4: note = 7-methyl-L-tryptophan
  MOD_RES 5: note = N6-acetyl-N6-methyl-L-lysine
  MOD_RES 6: note = L-penicillamine
  MOD_RES 7: note (S)-5-(4-(2-amino-2-carboxyethyl)phenoxy)-N,N,N-trimethylpe ntan-1-aminium
  MOD_RES 8: note = 3-(2-naphthyl)-L-alanine
  MOD_RES 9: note = 4-aminotetrahydro-2H-pyran-4-carboxylic acid
  MOD_RES 10: note = N6-acetyl-N6-methyl-L-lysine
  MOD_RES 12: note = 3-(3-Pyridyl)-L-alanine
  MOD_RES 13: note = MeGly
  SITE 1: note = N-terminal N,N,N-trimethyl-2-(2-(3-carbonylpropoxy)ethoxy)ethan-1-amin ium
XATWXXXXXXNXX

SEQ ID NO: 497 - protein, 13 aa, synthetic construct
  MOD_RES 1: note = L-penicillamine
  SITE 13: note = C-terminal N,N-dimethylamidyl
  MOD_RES 2: note = N4,N4-dimethyl-L-asparagine
  MOD_RES 4: note = 7-methyl-L-tryptophan
  MOD_RES 5: note = N6-acetyl-N6-methyl-L-lysine
  MOD_RES 6: note = L-penicillamine
  MOD_RES 7: note (S)-5-(4-(2-amino-2-carboxyethyl)phenoxy)-N,N,N-trimethylpe ntan-1-aminium
  MOD_RES 9: note = 4-aminotetrahydro-2H-pyran-4-carboxylic acid
  MOD_RES 10: note = N6-acetyl-N6-methyl-L-lysine
  MOD_RES 12: note = 3-(3-Pyridyl)-L-alanine
  MOD_RES 13: note = MeGly
  SITE 1: note = N-terminal N,N,N-trimethyl-2-(2-(3-carbonylpropoxy)ethoxy)ethan-1-amin ium
XNTWXXXWXXNXX

SEQ ID NO: 498 - protein, 13 aa, synthetic construct
  SITE 13: note = C-terminal N,N-dimethylamidyl
  MOD_RES 1: note = L-penicillamine
  MOD_RES 2: note = N4,N4-dimethyl-L-asparagine
  MOD_RES 4: note = 7-methyl-L-tryptophan
  MOD_RES 5: note = N6-acetyl-N6-methyl-L-lysine
  MOD_RES 6: note = L-penicillamine
  MOD_RES 7: note (S)-5-(4-(2-amino-2-carboxyethyl)phenoxy)-N,N,N-trimethylpe ntan-1-aminium
  MOD_RES 9: note = 4-aminotetrahydro-2H-pyran-4-carboxylic acid
  MOD_RES 10: note = N6-acetyl-N6-methyl-L-lysine
  MOD_RES 12: note = 3-(3-Pyridyl)-L-alanine
  MOD_RES 13: note = MeGly
  SITE 1: note = N-terminal N,N,N-trimethyl-2-(2-(3-carbonylpropoxy)ethoxy)ethan-1-amin ium
XNTWXXXFXXNXX

SEQ ID NO: 499 - protein, 13 aa, synthetic construct
  SITE 13: note = C-terminal N,N-dimethylamidyl
  MOD_RES 1: note = L-penicillamine
  MOD_RES 2: note = N4,N4-dimethyl-L-asparagine
  MOD_RES 4: note = 7-methyl-L-tryptophan
  MOD_RES 5: note = N6-acetyl-N6-methyl-L-lysine
  MOD_RES 6: note = L-penicillamine
  MOD_RES 7: note (S)-5-(4-(2-amino-2-carboxyethyl)phenoxy)-N,N,N-trimethylpe ntan-1-aminium
  MOD_RES 9: note = 4-aminotetrahydro-2H-pyran-4-carboxylic acid
  MOD_RES 10: note = N6-acetyl-N6-methyl-L-lysine
  MOD_RES 12: note = 3-(3-Pyridyl)-L-alanine
  MOD_RES 13: note = MeGly
  SITE 1: note = N-terminal N,N,N-trimethyl-2-(2-(3-carbonylpropoxy)ethoxy)ethan-1-amin ium
XNTWXXXLXXNXX

SEQ ID NO: 500 - protein, 13 aa, synthetic construct
  SITE 13: note = C-terminal N,N-dimethylamidyl
  MOD_RES 1: note = L-penicillamine
  MOD_RES 2: note = N4,N4-dimethyl-L-asparagine
  MOD_RES 4: note = 7-methyl-L-tryptophan
  MOD_RES 5: note = N6-acetyl-N6-methyl-L-lysine
  MOD_RES 6: note = L-penicillamine
  MOD_RES 7: note (S)-5-(4-(2-amino-2-carboxyethyl)phenoxy)-N,N,N-trimethylpe ntan-1-aminium
  MOD_RES 9: note = 4-aminotetrahydro-2H-pyran-4-carboxylic acid
  MOD_RES 10: note = N6-acetyl-N6-methyl-L-lysine
  MOD_RES 12: note = 3-(3-Pyridyl)-L-alanine
  MOD_RES 13: note = MeGly
  SITE 1: note = N-terminal N,N,N-trimethyl-2-(2-(3-carbonylpropoxy)ethoxy)ethan-1-amin ium
XNTWXXXAXXNXX

SEQ ID NO: 501 - protein, 13 aa, synthetic construct
  SITE 13: note = C-terminal amidyl
  MOD_RES 1: note = L-penicillamine
  MOD_RES 4: note (S)-3-(7-(3-acetamidophenyl)-1H-indol-3-yl)-2-aminopropanoi c acid
  MOD_RES 5: note = N6-acetyl-L-lysine
  MOD_RES 6: note = L-penicillamine
  MOD_RES 7: note (S)-5-(4-(2-amino-2-carboxyethyl)phenoxy)-N,N,N-trimethylpe ntan-1-aminium
  MOD_RES 8: note = 3-(2-naphthyl)-L-alanine
  MOD_RES 9: note = 4-aminotetrahydro-2H-pyran-4-carboxylic acid
  MOD_RES 10: note = N6-acetyl-N6-methyl-L-lysine
  MOD_RES 12: note = (S)-2-amino-3-(5-methylpyridin-3-yl)propanoic acid
  MOD_RES 13: note = MeGly
  SITE 1: note = N-terminal N,N,N-trimethyl-2-(2-(3-carbonylpropoxy)ethoxy)ethan-1-amin ium
XNTXKXXXXXNXX

SEQ ID NO: 502 - protein, 13 aa, synthetic construct
  SITE 13: note = C-terminal amidyl
  MOD_RES 1: note = L-penicillamine
  MOD_RES 4: note (S)-3-(7-(3-acetamidophenyl)-1H-indol-3-yl)-2-aminopropanoi c acid
  MOD_RES 5: note = N6-acetyl-L-lysine
  MOD_RES 6: note = L-penicillamine
  MOD_RES 7: note (S)-5-(4-(2-amino-2-carboxyethyl)phenoxy)-N,N,N-trimethylpe ntan-1-aminium
  MOD_RES 8: note = 3-(2-naphthyl)-L-alanine
  MOD_RES 9: note = 4-aminotetrahydro-2H-pyran-4-carboxylic acid
  MOD_RES 10: note = N6-acetyl-N6-methyl-L-lysine
  MOD_RES 12: note = (S)-2-amino-3-(5-methylpyridin-3-yl)propanoic acid
  MOD_RES 13: note = MeGly
  SITE 1: note = N-terminal acetyl
XNTXKXXXXXNXX

SEQ ID NO: 503 - protein, 13 aa, synthetic construct
  SITE 13: note = C-terminal amidyl
  MOD_RES 1: note = L-penicillamine
  MOD_RES 4: note (S)-3-(7-(3-acetamidophenyl)-1H-indol-3-yl)-2-aminopropanoi c acid
  MOD_RES 5: note = N6-acetyl-L-lysine
  MOD_RES 6: note = L-penicillamine
  MOD_RES 7: note (S)-5-(4-(2-amino-2-carboxyethyl)phenoxy)-N,N,N-trimethylpe ntan-1-aminium
  MOD_RES 8: note = 3-(2-naphthyl)-L-alanine
  MOD_RES 9: note = 4-aminotetrahydro-2H-pyran-4-carboxylic acid
  MOD_RES 10: note = N6-acetyl-L-lysine
  MOD_RES 12: note = (S)-2-amino-3-(5-methylpyridin-3-yl)propanoic acid
  MOD_RES 13: note = MeGly
  SITE 1: note = N-terminal acetyl
XNTXKXXXXKNXX

SEQ ID NO: 504 - protein, 13 aa, synthetic construct
  SITE 13: note = C-terminal amidyl
  MOD_RES 1: note = L-penicillamine
  MOD_RES 4: note (S)-3-(7-(3-acetamidophenyl)-1H-indol-3-yl)-2-aminopropanoi c acid
  MOD_RES 5: note = N6-acetyl-L-lysine
  MOD_RES 6: note = L-penicillamine
  MOD_RES 7: note (S)-5-(4-(2-amino-2-carboxyethyl)phenoxy)-N,N,N-trimethylpe ntan-1-aminium
  MOD_RES 8: note = 3-(2-naphthyl)-L-alanine
  MOD_RES 9: note = 4-aminotetrahydro-2H-pyran-4-carboxylic acid
  MOD_RES 12: note = (S)-2-amino-3-(5-methylpyridin-3-yl)propanoic acid
  MOD_RES 13: note = MeGly
  SITE 1: note = N-terminal acetyl
XNTXKXXXXENXX

SEQ ID NO: 505 - protein, 13 aa, synthetic construct
  SITE 13: note = C-terminal amidyl
  MOD_RES 1: note = L-penicillamine
  MOD_RES 4: note = 7-methyl-L-tryptophan
  MOD_RES 5: note = N6-acetyl-L-lysine
  MOD_RES 6: note = L-penicillamine
  MOD_RES 7: note (S)-5-(4-(2-amino-2-carboxyethyl)phenoxy)-N,N,N-trimethylpe ntan-1-aminium
  MOD_RES 8: note = 3-(2-naphthyl)-L-alanine
  MOD_RES 9: note = 4-aminotetrahydro-2H-pyran-4-carboxylic acid
  MOD_RES 12: note = (S)-2-amino-3-(5-methylpyridin-3-yl)propanoic acid
  MOD_RES 13: note = MeGly
  SITE 1: note = N-terminal N,N,N-trimethyl-2-(2-(3-carbonylpropoxy)ethoxy)ethan-1-amin ium
XNTWKXXXXENXX

SEQ ID NO: 506 - protein, 13 aa, synthetic construct
  SITE 13: note = C-terminal amidyl
  MOD_RES 1: note = L-penicillamine
  MOD_RES 4: note = 7-methyl-L-tryptophan
  MOD_RES 5: note = N6-acetyl-L-lysine
  MOD_RES 6: note = L-penicillamine
  MOD_RES 7: note = 4-(2-aminoethoxy)-L-phenylalanine
  MOD_RES 8: note = 3-(2-naphthyl)-L-alanine
  MOD_RES 9: note = 4-aminotetrahydro-2H-pyran-4-carboxylic acid
  MOD_RES 12: note = (S)-2-amino-3-(5-methylpyridin-3-yl)propanoic acid
  MOD_RES 13: note = MeGly
  SITE 1: note = N-terminal N,N,N-trimethyl-2-(2-(3-carbonylpropoxy)ethoxy)ethan-1-amin ium
XNTWKXXXXENXX

SEQ ID NO: 507 - protein, 13 aa, synthetic construct
  SITE 13: note = C-terminal N,N-dimethylamidyl
  MOD_RES 1: note = L-penicillamine
  MOD_RES 2: note = N4,N4-dimethyl-L-asparagine
  MOD_RES 5: note = N6-acetyl-N6-methyl-L-lysine
  MOD_RES 6: note = L-penicillamine
  MOD_RES 7: note (S)-5-(4-(2-amino-2-carboxyethyl)phenoxy)-N,N,N-trimethylpe ntan-1-aminium
  MOD_RES 8: note = 3-(2-naphthyl)-L-alanine
  MOD_RES 9: note = 4-aminotetrahydro-2H-pyran-4-carboxylic acid
  MOD_RES 10: note = N6-acetyl-N6-methyl-L-lysine
  MOD_RES 12: note = 3-(3-Pyridyl)-L-alanine
  MOD_RES 13: note = MeGly
  SITE 1: note = N-terminal N,N,N-trimethyl-2-(2-(3-carbonylpropoxy)ethoxy)ethan-1-amin ium
XNTWXXXXXXNXX

SEQ ID NO: 508 - protein, 14 aa, synthetic construct
  SITE 14: note = C-terminal amidyl
  MOD_RES 2: note = L-penicillamine
  MOD_RES 5: note = 7-methyl-L-tryptophan
  MOD_RES 6: note = N6-acetyl-L-lysine
  MOD_RES 7: note = L-penicillamine
  SITE 1: note = D-Arginine
  MOD_RES 8: note = 4-(2-aminoethoxy)-L-phenylalanine(G)
  MOD_RES 9: note = 3-(2-naphthyl)-L-alanine
  MOD_RES 10: note = 4-aminotetrahydro-2H-pyran-4-carboxylic acid
  MOD_RES 13: note = (S)-2-amino-3-(5-methylpyridin-3-yl)propanoic acid
  MOD_RES 14: note = MeGly
  SITE 1: note = N-terminal N,N,N-trimethyl-2-(2-(3-carbonylpropoxy)ethoxy)ethan-1-amin ium
XXNTWKXXXXENXX

SEQ ID NO: 509 - skipped

SEQ ID NO: 510 - protein, 13 aa, synthetic construct
  MOD_RES 1: note = L-penicillamine
  SITE 13: note = C-terminal N,N-dimethylamidyl
  MOD_RES 2: note = N4,N4-dimethyl-L-asparagine
  MOD_RES 5: note = N6-acetyl-N6-methyl-L-lysine
  MOD_RES 6: note = L-penicillamine
  MOD_RES 7: note (S)-5-(4-(2-amino-2-carboxyethyl)phenoxy)-N,N,N-trimethylpe ntan-1-aminium
  MOD_RES 8: note = 3-(2-naphthyl)-L-alanine
  MOD_RES 9: note = 4-aminotetrahydro-2H-pyran-4-carboxylic acid
  MOD_RES 10: note = N6-acetyl-N6-methyl-L-lysine
  MOD_RES 12: note = 3-(3-Pyridyl)-L-alanine
  MOD_RES 13: note = MeGly
  SITE 1: note = N-terminal N,N,N-trimethyl-2-(2-(3-carbonylpropoxy)ethoxy)ethan-1-amin ium
XNTFXXXXXXNXX

SEQ ID NO: 511 - protein, 13 aa, synthetic construct
  SITE 13: note = C-terminal N,N-dimethylamidyl
  MOD_RES 1: note = L-penicillamine
  MOD_RES 2: note = N4,N4-dimethyl-L-asparagine
  MOD_RES 5: note = N6-acetyl-N6-methyl-L-lysine
  MOD_RES 6: note = L-penicillamine
  MOD_RES 7: note (S)-5-(4-(2-amino-2-carboxyethyl)phenoxy)-N,N,N-trimethylpe ntan-1-aminium
  MOD_RES 8: note = 3-(2-naphthyl)-L-alanine
  MOD_RES 9: note = 4-aminotetrahydro-2H-pyran-4-carboxylic acid
  MOD_RES 10: note = N6-acetyl-N6-methyl-L-lysine
  MOD_RES 12: note = 3-(3-Pyridyl)-L-alanine
  MOD_RES 13: note = MeGly
  SITE 1: note = N-terminal N,N,N-trimethyl-2-(2-(3-carbonylpropoxy)ethoxy)ethan-1-amin ium
XNTLXXXXXXNXX

SEQ ID NO: 512 - protein, 13 aa, synthetic construct
  SITE 13: note = C-terminal N,N-dimethylamidyl
  MOD_RES 1: note = L-penicillamine
  MOD_RES 2: note = N4,N4-dimethyl-L-asparagine
  MOD_RES 5: note = N6-acetyl-N6-methyl-L-lysine
  MOD_RES 6: note = L-penicillamine
  MOD_RES 7: note (S)-5-(4-(2-amino-2-carboxyethyl)phenoxy)-N,N,N-trimethylpe ntan-1-aminium
  MOD_RES 8: note = 3-(2-naphthyl)-L-alanine
  MOD_RES 9: note = 4-aminotetrahydro-2H-pyran-4-carboxylic acid
  MOD_RES 10: note = N6-acetyl-N6-methyl-L-lysine
  MOD_RES 12: note = 3-(3-Pyridyl)-L-alanine
  MOD_RES 13: note = MeGly
  SITE 1: note = N-terminal N,N,N-trimethyl-2-(2-(3-carbonylpropoxy)ethoxy)ethan-1-amin ium
XNTAXXXXXXNXX

SEQ ID NO: 513 - protein, 14 aa, synthetic construct
  SITE 14: note = C-terminal amidyl
  MOD_RES 1: note = (R)-5-amino-5-carboxy-N,N,N-trimethylpentan-1-aminium
  MOD_RES 2: note = L-penicillamine
  MOD_RES 5: note (S)-3-(7-(3-acetamidophenyl)-1H-indol-3-yl)-2-aminopropanoi c acid
  MOD_RES 6: note = N6-acetyl-L-lysine
  MOD_RES 7: note = L-penicillamine
  MOD_RES 8: note (S)-5-(4-(2-amino-2-carboxyethyl)phenoxy)-N,N,N-trimethylpe ntan-1-aminium
  MOD_RES 9: note = 3-(2-naphthyl)-L-alanine
  MOD_RES 10: note = 4-aminotetrahydro-2H-pyran-4-carboxylic acid
  MOD_RES 13: note = (S)-2-amino-3-(5-methylpyridin-3-yl)propanoic acid
  MOD_RES 14: note = MeGly
  SITE 1: note = N-terminal acetyl
KXNTXKXXXXENXX

SEQ ID NO: 514 - protein, 13 aa, synthetic construct
  MOD_RES 1: note = L-penicillamine
  SITE 13: note = C-terminal amidyl
  MOD_RES 4: note = 7-methyl-L-tryptophan
  MOD_RES 5: note = N6-acetyl-L-lysine
  MOD_RES 6: note = L-penicillamine
  MOD_RES 7: note = 4-(2-aminoethoxy)-L-phenylalanine(G)
  MOD_RES 8: note = 3-(2-naphthyl)-L-alanine
  MOD_RES 9: note = 4-aminotetrahydro-2H-pyran-4-carboxylic acid
  MOD_RES 12: note = (S)-2-amino-3-(5-methylpyridin-3-yl)propanoic acid
  MOD_RES 13: note = MeGly
  SITE 1: note = N-terminal N,N,N-trimethyl-2-(2-(3-carbonylpropoxy)ethoxy)ethan-1-amin ium
XNTWKXXXXENXX

SEQ ID NO: 515 - protein, 13 aa, synthetic construct
  SITE 13: note = C-terminal amidyl
  MOD_RES 1: note = L-penicillamine
  MOD_RES 4: note (S)-3-(7-(3-acetamidophenyl)-1H-indol-3-yl)-2-aminopropanoi c acid
  MOD_RES 5: note = N6-acetyl-L-lysine
  MOD_RES 6: note = L-penicillamine
  MOD_RES 7: note = 4-(2-aminoethoxy)-L-phenylalanine(G)
  MOD_RES 8: note = 3-(2-naphthyl)-L-alanine
  MOD_RES 9: note = 4-aminotetrahydro-2H-pyran-4-carboxylic acid
  MOD_RES 10: note = N6-acetyl-N6-methyl-L-lysine
  MOD_RES 12: note = 3-(3-Pyridyl)-L-alanine
  MOD_RES 13: note = MeGly
  SITE 1: note = N-terminal acetyl
XNTXKXXXXXNXX

SEQ ID NO: 516 - protein, 14 aa, synthetic construct
  SITE 14: note = C-terminal amidyl
  SITE 1: note = D-Arginine
  MOD_RES 2: note = Abu
  MOD_RES 6: note = N6-acetyl-L-lysine
  MOD_RES 7: note = 2-methyl-cysteine
  MOD_RES 8: note (S)-5-(4-(2-amino-2-carboxyethyl)phenoxy)-N,N,N-trimethylpe ntan-1-aminium
  MOD_RES 9: note = 3-(2-naphthyl)-L-alanine
  MOD_RES 10: note = 4-aminotetrahydro-2H-pyran-4-carboxylic acid
  MOD_RES 13: note = 3-(3-Pyridyl)-L-alanine
  MOD_RES 14: note = MeGly
  SITE 1: note = N-terminal N,N,N-trimethyl-2-(2-(3-carbonylpropoxy)ethoxy)ethan-1-amin ium
RXNTWKXXXXENXX

SEQ ID NO: 517 - protein, 14 aa, synthetic construct
  SITE 14: note = C-terminal amidyl
  MOD_RES 1: note = (R)-5-amino-5-carboxy-N,N,N-trimethylpentan-1-aminium
  MOD_RES 2: note = Abu
  MOD_RES 6: note = N6-acetyl-L-lysine
  MOD_RES 7: note = 2-methyl-cysteine
  MOD_RES 8: note (S)-5-(4-(2-amino-2-carboxyethyl)phenoxy)-N,N,N-trimethylpe ntan-1-aminium
  MOD_RES 9: note = 3-(2-naphthyl)-L-alanine
  MOD_RES 10: note = 4-aminotetrahydro-2H-pyran-4-carboxylic acid
  MOD_RES 11: note = N6-acetyl-L-lysine
  MOD_RES 13: note = 3-(3-Pyridyl)-L-alanine
  MOD_RES 14: note = MeGly
  SITE 1: note = N-terminal acetyl
KXNTWKXXXXKNXX

SEQ ID NO: 518 - protein, 14 aa, synthetic construct
  SITE 14: note = C-terminal amidyl
  SITE 1: note = D-Arginine
  MOD_RES 2: note = Abu
  MOD_RES 6: note = N6-acetyl-L-lysine
  MOD_RES 7: note = 2-methyl-cysteine
  MOD_RES 8: note (S)-5-(4-(2-amino-2-carboxyethyl)phenoxy)-N,N,N-trimethylpe ntan-1-aminium
  MOD_RES 9: note = 3-(2-naphthyl)-L-alanine
  MOD_RES 10: note = 4-aminotetrahydro-2H-pyran-4-carboxylic acid
  MOD_RES 11: note = N6-acetyl-L-lysine
  MOD_RES 13: note = 3-(3-Pyridyl)-L-alanine
  MOD_RES 14: note = MeGly
  SITE 1: note = N-terminal N,N,N-trimethyl-2-(2-(3-carbonylpropoxy)ethoxy)ethan-1-amin ium
RXNTWKXXXXKNXX

SEQ ID NO: 519 - protein, 13 aa, synthetic construct
  SITE 13: note = C-terminal amidyl
  MOD_RES 1: note = L-penicillamine
  MOD_RES 4: note (S)-3-(7-(3-acetamidophenyl)-1H-indol-3-yl)-2-aminopropanoi c acid
  MOD_RES 5: note = N6-acetyl-L-lysine
  MOD_RES 6: note = L-penicillamine
  MOD_RES 7: note = 4-(2-aminoethoxy)-L-phenylalanine(G)
  MOD_RES 8: note = 3-(2-naphthyl)-L-alanine
  MOD_RES 9: note = 4-aminotetrahydro-2H-pyran-4-carboxylic acid
  MOD_RES 10: note = N6-acetyl-N6-methyl-L-lysine
  MOD_RES 12: note = 3-(3-Pyridyl)-L-alanine
  MOD_RES 13: note = MeGly
  SITE 1: note = N-terminal N,N,N-trimethyl-2-(2-(3-carbonylpropoxy)ethoxy)ethan-1-amin ium
XNTXKXXXXXNXX

SEQ ID NO: 520 - protein, 13 aa, synthetic construct
  SITE 13: note = C-terminal N,N-dimethylamidyl
  MOD_RES 1: note = L-penicillamine
  MOD_RES 2: note = N4,N4-dimethyl-L-asparagine
  MOD_RES 4: note = 7-methyl-L-tryptophan
  MOD_RES 5: note = N6-acetyl-N6-methyl-L-lysine
  MOD_RES 6: note = L-penicillamine
  MOD_RES 7: note (S)-2-(2-(2-(4-(2-amino-2-carboxyethyl)phenoxy)ethoxy)ethox y)-N,N,N-trimethylethan-1-aminium
  MOD_RES 8: note = 3-(2-naphthyl)-L-alanine
  MOD_RES 9: note = 4-aminotetrahydro-2H-pyran-4-carboxylic acid
  SITE 10: note = Nle
  MOD_RES 12: note = 3-(3-Pyridyl)-L-alanine
  MOD_RES 13: note = MeGly
  SITE 1: note = N-terminal N,N,N-trimethyl-2-(2-(3-carbonylpropoxy)ethoxy)ethan-1-amin ium
XNTWXXXXXXNXX

SEQ ID NO: 521 - protein, 13 aa, synthetic construct
  SITE 13: note = C-terminal amidyl
  MOD_RES 1: note = L-penicillamine
  MOD_RES 4: note = 7-methyl-L-tryptophan
  MOD_RES 5: note = N6-acetyl-L-lysine
  MOD_RES 6: note = L-penicillamine
  MOD_RES 7: note (S)-2-amino-3-(4-(4-(2-guanidinoethyl)-1H-1,2,3-triazol-1-y l)phenyl)propanoic acid
  MOD_RES 8: note = 3-(2-naphthyl)-L-alanine
  MOD_RES 9: note = 4-aminotetrahydro-2H-pyran-4-carboxylic acid
  MOD_RES 10: note = N6-acetyl-L-lysine
  MOD_RES 12: note = 3-(3-Pyridyl)-L-alanine
  MOD_RES 13: note = MeGly
  SITE 1: note = N-terminal N,N,N-trimethyl-2-(2-(3-carbonylpropoxy)ethoxy)ethan-1-amin ium
XNTWKXXXXKNXX

SEQ ID NO: 522 - protein, 13 aa, synthetic construct
  SITE 13: note = C-terminal amidyl
  MOD_RES 1: note = L-penicillamine
  MOD_RES 4: note = 7-methyl-L-tryptophan
  MOD_RES 5: note = N6-acetyl-L-lysine
  MOD_RES 6: note = L-penicillamine
  MOD_RES 7: note (S)-2-amino-3-(4-(4-(2-aminoethyl)-1H-1,2,3-triazol-1-yl)ph enyl)propanoic acid
  MOD_RES 8: note = 3-(2-naphthyl)-L-alanine
  MOD_RES 9: note = 4-aminotetrahydro-2H-pyran-4-carboxylic acid
  MOD_RES 10: note = N6-acetyl-L-lysine
  MOD_RES 12: note = 3-(3-Pyridyl)-L-alanine
  MOD_RES 13: note = MeGly
  SITE 1: note = N-terminal N,N,N-trimethyl-2-(2-(3-carbonylpropoxy)ethoxy)ethan-1-amin ium
XNTWKXXXXKNXX

SEQ ID NO: 523 - protein, 13 aa, synthetic construct
  SITE 13: note = C-terminal N,N-dimethylamidyl
  MOD_RES 1: note = Abu
  MOD_RES 2: note = N4,N4-dimethyl-L-asparagine
  MOD_RES 4: note = 7-methyl-L-tryptophan
  MOD_RES 5: note = N6-acetyl-N6-methyl-L-lysine
  MOD_RES 7: note (S)-5-(4-(2-amino-2-carboxyethyl)phenoxy)-N,N,N-trimethylpe ntan-1-aminium
  MOD_RES 8: note = 3-(2-naphthyl)-L-alanine
  MOD_RES 9: note = 4-aminotetrahydro-2H-pyran-4-carboxylic acid
  MOD_RES 10: note = N6-acetyl-N6-methyl-L-lysine
  MOD_RES 12: note = 3-(3-Pyridyl)-L-alanine
  MOD_RES 13: note = MeGly
  SITE 1: note = N-terminal N,N,N-trimethyl-2-(2-(3-carbonylpropoxy)ethoxy)ethan-1-amin ium
XNTWXCXXXXNXX

SEQ ID NO: 524 - protein, 13 aa, synthetic construct
  SITE 13: note = C-terminal amidyl
  MOD_RES 1: note = L-penicillamine
  MOD_RES 4: note = 7-methyl-L-tryptophan
  MOD_RES 5: note = N6-acetyl-L-lysine
  MOD_RES 6: note = L-penicillamine
  MOD_RES 7: note (S)-5-(4-(2-amino-2-carboxyethyl)phenoxy)-N,N,N-trimethylpe ntan-1-aminium
  MOD_RES 8: note = 3-(2-naphthyl)-L-alanine
  MOD_RES 9: note = 4-aminotetrahydro-2H-pyran-4-carboxylic acid
  MOD_RES 10: note = N6-(4-(4-iodophenyl)butanoyl)-D-lysine
  MOD_RES 12: note = 3-(3-Pyridyl)-L-alanine
  MOD_RES 13: note = MeGly
  SITE 1: note = N-terminal 4-(carboxymethoxy)-2',4'-difluoro-[1,1'-biphenyl]-3-amidyl
  SITE 10: note = N6-(4-(4-iodophenyl)butanoyl)-D-lysine
XNTWKXXXXXNXX

SEQ ID NO: 525 - protein, 13 aa, synthetic construct
  SITE 13: note = C-terminal amidyl
  MOD_RES 1: note = L-penicillamine
  MOD_RES 4: note = 7-methyl-L-tryptophan
  MOD_RES 5: note = N6-acetyl-L-lysine
  MOD_RES 6: note = L-penicillamine
  MOD_RES 7: note (S)-5-(4-(2-amino-2-carboxyethyl)phenoxy)-N,N,N-trimethylpe ntan-1-aminium
  MOD_RES 8: note = 3-(2-naphthyl)-L-alanine
  MOD_RES 9: note = 4-aminotetrahydro-2H-pyran-4-carboxylic acid
  MOD_RES 10: note (S)-4-(2-((5-amino-5-carboxypentyl)amino)-2-oxoethoxy)-2',4 '-difluoro-[1,1'-biphenyl]-3-carboxylic acid
  MOD_RES 12: note = 3-(3-Pyridyl)-L-alanine
  MOD_RES 13: note = MeGly
  SITE 1: note = N-terminal 4-(4-iodophenyl)butanoic acid
XNTWKXXXXXNXX

SEQ ID NO: 526 - protein, 13 aa, synthetic construct
  SITE 13: note = C-terminal amidyl
  MOD_RES 1: note = L-penicillamine
  MOD_RES 4: note = 7-methyl-L-tryptophan
  MOD_RES 5: note = N6-acetyl-L-lysine
  MOD_RES 6: note = L-penicillamine
  MOD_RES 7: note (S)-5-(4-(2-amino-2-carboxyethyl)phenoxy)-N,N,N-trimethylpe ntan-1-aminium
  MOD_RES 8: note = 3-(2-naphthyl)-L-alanine
  MOD_RES 9: note = 4-aminotetrahydro-2H-pyran-4-carboxylic acid
  MOD_RES 10: note (S)-4-(2-((5-amino-5-carboxypentyl)amino)-2-oxoethoxy)-2',4 '-difluoro-[1,1'-biphenyl]-3-carboxylic acid
  MOD_RES 12: note = 3-(3-Pyridyl)-L-alanine
  MOD_RES 13: note = MeGly
  SITE 1: note = N-terminal acetyl
XNTWKXXXXXNXX

SEQ ID NO: 527 - protein, 13 aa, synthetic construct
  SITE 13: note = C-terminal amidyl
  MOD_RES 1: note = L-penicillamine
  MOD_RES 4: note = 7-methyl-L-tryptophan
  MOD_RES 5: note = N6-acetyl-L-lysine
  MOD_RES 6: note = L-penicillamine
  MOD_RES 7: note (S)-5-(4-(2-amino-2-carboxyethyl)phenoxy)-N,N,N-trimethylpe ntan-1-aminium
  MOD_RES 8: note = 3-(2-naphthyl)-L-alanine
  MOD_RES 9: note = 4-aminotetrahydro-2H-pyran-4-carboxylic acid
  MOD_RES 10: note = N6-acetyl-L-lysine
  MOD_RES 12: note = 3-(3-Pyridyl)-L-alanine
  MOD_RES 13: note = MeGly
  SITE 1: note = N-terminal 4-(carboxymethoxy)-2',4'-difluoro-[1,1'-biphenyl]-3-amidyl
XNTWKXXXXKNXX

SEQ ID NO: 528 - protein, 13 aa, synthetic construct
  SITE 13: note = C-terminal N,N-dimethylamidyl
  MOD_RES 1: note = L-penicillamine
  MOD_RES 2: note = N4,N4-dimethyl-L-asparagine
  MOD_RES 4: note = 7-methyl-L-tryptophan
  MOD_RES 5: note = N6-acetyl-N6-methyl-L-lysine
  MOD_RES 6: note = L-penicillamine
  MOD_RES 7: note (S)-6-(4-(2-amino-2-carboxyethyl)phenoxy)-N,N,N-trimethylhe xan-1-aminium
  MOD_RES 8: note = 3-(2-naphthyl)-L-alanine
  MOD_RES 9: note = 4-aminotetrahydro-2H-pyran-4-carboxylic acid
  MOD_RES 10: note = N6-acetyl-N6-methyl-L-lysine
  MOD_RES 12: note = 3-(3-Pyridyl)-L-alanine
  MOD_RES 13: note = MeGly
  SITE 1: note = N-terminal N,N,N-trimethyl-2-(2-(3-carbonylpropoxy)ethoxy)ethan-1-amin ium
XNTWXXXXXXNXX

SEQ ID NO: 529 - protein, 13 aa, synthetic construct
  SITE 13: note = C-terminal N,N-dimethylamidyl
  MOD_RES 1: note = L-penicillamine
  MOD_RES 2: note = N4,N4-dimethyl-L-asparagine
  MOD_RES 4: note = 7-methyl-L-tryptophan
  MOD_RES 5: note = N6-acetyl-N6-methyl-L-lysine
  MOD_RES 6: note = L-penicillamine
  MOD_RES 7: note (S)-6-(4-(2-amino-2-carboxyethyl)phenoxy)-N,N,N-trimethylhe xan-1-aminium
  MOD_RES 8: note = 3-(2-naphthyl)-L-alanine
  MOD_RES 9: note = 4-aminotetrahydro-2H-pyran-4-carboxylic acid
  MOD_RES 10: note = N6-acetyl-N6-methyl-L-lysine
  MOD_RES 12: note = 3-(3-Pyridyl)-L-alanine
  MOD_RES 13: note = MeGly
  SITE 1: note = N-terminal N,N,N-trimethyl-2-(2-(3-carbonylpropoxy)ethoxy)ethan-1-amin iumSITE203
XNTWXXXXXXNXX

SEQ ID NO: 530 - protein, 13 aa, synthetic construct
  SITE 13: note = C-terminal amidyl
  MOD_RES 1: note = L-penicillamine
  MOD_RES 4: note = 7-methyl-L-tryptophan
  MOD_RES 5: note = N6-acetyl-L-lysine
  MOD_RES 6: note = L-penicillamine
  MOD_RES 7: note (1R,4s)-4-((4-((S)-2-amino-2-carboxyethyl)phenoxy)methyl)-N ,N,N-trimethylcyclohexan-1-aminium
  MOD_RES 8: note = 3-(2-naphthyl)-L-alanine
  MOD_RES 9: note = 4-aminotetrahydro-2H-pyran-4-carboxylic acid
  MOD_RES 10: note = N6-acetyl-L-lysine
  MOD_RES 12: note = 3-(3-Pyridyl)-L-alanine
  MOD_RES 13: note = MeGly
  SITE 1: note = N-terminal acetyl
XNTWKXXXXKNXX

SEQ ID NO: 531 - protein, 13 aa, synthetic construct
  SITE 13: note = C-terminal amidyl
  MOD_RES 1: note = L-penicillamine
  MOD_RES 4: note = 7-methyl-L-tryptophan
  MOD_RES 5: note = N6-acetyl-L-lysine
  MOD_RES 6: note = L-penicillamine
  MOD_RES 7: note (1S,4r)-4-((4-((S)-2-amino-2-carboxyethyl)phenoxy)methyl)-N ,N,N-trimethylcyclohexan-1-aminium
  MOD_RES 8: note = 3-(2-naphthyl)-L-alanine
  MOD_RES 9: note = 4-aminotetrahydro-2H-pyran-4-carboxylic acid
  MOD_RES 10: note = N6-acetyl-L-lysine
  MOD_RES 12: note = 3-(3-Pyridyl)-L-alanine
  MOD_RES 13: note = MeGly
  SITE 1: note = N-terminal acetyl
XNTWKXXXXKNXX

SEQ ID NO: 532 - protein, 14 aa, synthetic construct
  SITE 14: note = C-terminal amidyl
  SITE 1: note = D-Arginine
  MOD_RES 2: note = L-penicillamine
  MOD_RES 5: note = 7-methyl-L-tryptophan
  MOD_RES 6: note = N6-acetyl-L-lysine
  MOD_RES 7: note = L-penicillamine
  MOD_RES 8: note (S)-5-(4-(2-amino-2-carboxyethyl)phenoxy)-N,N,N-trimethylpe ntan-1-aminium
  MOD_RES 9: note = 3-(2-naphthyl)-L-alanine
  MOD_RES 10: note = 4-aminotetrahydro-2H-pyran-4-carboxylic acid
  MOD_RES 11: note = N6-acetyl-L-lysine
  MOD_RES 13: note = (S)-2-amino-3-(5-methylpyridin-3-yl)propanoic acid
  MOD_RES 14: note = MeGly
  SITE 1: note = N-terminal acetyl
RXNTWKXXXXKNXX

SEQ ID NO: 533 - protein, 14 aa, synthetic construct
  MOD_RES 1: note = (R)-5-amino-5-carboxy-N,N,N-trimethylpentan-1-aminium
  MOD_RES 2: note = L-penicillamine
  MOD_RES 5: note = 7-methyl-L-tryptophan
  MOD_RES 6: note = N6-acetyl-L-lysine
  MOD_RES 7: note = L-penicillamine
  MOD_RES 8: note = 4-(2-aminoethoxy)-L-phenylalanine
  MOD_RES 9: note = 3-(2-naphthyl)-L-alanine
  MOD_RES 11: note = N6-acetyl-L-lysine
  MOD_RES 10: note = 4-aminotetrahydro-2H-pyran-4-carboxylic acid
  MOD_RES 13: note = (S)-2-amino-3-(5-methylpyridin-3-yl)propanoic acid
  MOD_RES 14: note = MeGly
  SITE 1: note = N-terminal acetyl
  SITE 14: note = C-terminal amidyl
KXNTWKXXXXKNXX

SEQ ID NO: 534 - protein, 14 aa, synthetic construct
  SITE 14: note = C-terminal amidyl
  MOD_RES 1: note = (R)-5-amino-5-carboxy-N,N,N-trimethylpentan-1-aminium
  MOD_RES 2: note = L-penicillamine
  MOD_RES 5: note = 7-methyl-L-tryptophan
  MOD_RES 6: note = N6-acetyl-L-lysine
  MOD_RES 7: note = L-penicillamine
  MOD_RES 8: note (S)-5-(4-(2-amino-2-carboxyethyl)phenoxy)-N,N,N-trimethylpe ntan-1-aminium
  MOD_RES 9: note = 3-(2-naphthyl)-L-alanine
  MOD_RES 10: note = 4-aminotetrahydro-2H-pyran-4-carboxylic acid
  MOD_RES 13: note = (S)-2-amino-3-(5-methylpyridin-3-yl)propanoic acid
  MOD_RES 14: note = MeGly
  SITE 1: note = N-terminal acetyl
KXNTWKXXXXENXX

SEQ ID NO: 535 - protein, 14 aa, synthetic construct
  SITE 14: note = C-terminal amidyl
  MOD_RES 1: note = (R)-5-amino-5-carboxy-N,N,N-trimethylpentan-1-aminium
  MOD_RES 2: note = L-penicillamine
  MOD_RES 5: note (S)-3-(7-(3-acetamidophenyl)-1H-indol-3-yl)-2-aminopropanoi c acid
  MOD_RES 6: note = N6-acetyl-L-lysine
  MOD_RES 7: note = L-penicillamine
  MOD_RES 8: note = 4-(2-aminoethoxy)-L-phenylalanine
  MOD_RES 9: note = 3-(2-naphthyl)-L-alanine
  MOD_RES 10: note = 4-aminotetrahydro-2H-pyran-4-carboxylic acid
  MOD_RES 13: note = (S)-2-amino-3-(5-methylpyridin-3-yl)propanoic acid
  MOD_RES 14: note = MeGly
  SITE 1: note = N-terminal acetyl
KXNTXKXXXXENXX

SEQ ID NO: 536 - protein, 14 aa, synthetic construct
  SITE 14: note = C-terminal amidyl
  SITE 1: note = D-Arginine
  MOD_RES 2: note = L-penicillamine
  MOD_RES 5: note (S)-3-(7-(3-acetamidophenyl)-1H-indol-3-yl)-2-aminopropanoi c acid
  MOD_RES 6: note = N6-acetyl-L-lysine
  MOD_RES 7: note = L-penicillamine
  MOD_RES 8: note = 4-(2-aminoethoxy)-L-phenylalanine
  MOD_RES 9: note = 3-(2-naphthyl)-L-alanine
  MOD_RES 10: note = 4-aminotetrahydro-2H-pyran-4-carboxylic acid
  MOD_RES 13: note = (S)-2-amino-3-(5-methylpyridin-3-yl)propanoic acid
  MOD_RES 14: note = MeGly
  SITE 1: note = N-terminal N,N,N-trimethyl-2-(2-(3-carbonylpropoxy)ethoxy)ethan-1-amin ium
RXNTXKXXXXENXX

SEQ ID NO: 537 - protein, 13 aa, synthetic construct
  SITE 13: note = C-terminal amidyl
  MOD_RES 1: note = L-penicillamine
  MOD_RES 4: note = 7-methyl-L-tryptophan
  MOD_RES 5: note = N6-acetyl-L-lysine
  MOD_RES 6: note = L-penicillamine
  MOD_RES 7: note (S)-5-(4-(2-amino-2-carboxyethyl)phenoxy)-N,N,N-trimethylpe ntan-1-aminium
  MOD_RES 8: note = 3-(2-naphthyl)-L-alanine
  MOD_RES 9: note = 1-aminocyclopentane-1-carboxylic acid
  MOD_RES 10: note = N6-acetyl-L-lysine
  MOD_RES 12: note = 3-(3-Pyridyl)-L-alanine
  MOD_RES 13: note = MeGly
  SITE 1: note = N-terminal acetyl
XNTWKXXXXKNXX

SEQ ID NO: 538 - protein, 13 aa, synthetic construct
  SITE 13: note = C-terminal amidyl
  MOD_RES 1: note = L-penicillamine
  MOD_RES 4: note = 7-methyl-L-tryptophan
  MOD_RES 5: note = N6-acetyl-L-lysine
  MOD_RES 6: note = L-penicillamine
  MOD_RES 7: note (S)-5-(4-(2-amino-2-carboxyethyl)phenoxy)-N,N,N-trimethylpe ntan-1-aminium
  MOD_RES 8: note = 3-(2-naphthyl)-L-alanine
  MOD_RES 9: note = 1-aminocyclohexane-1-carboxylic acid
  MOD_RES 10: note = N6-acetyl-L-lysine
  MOD_RES 12: note = 3-(3-Pyridyl)-L-alanine
  MOD_RES 13: note = MeGly
  SITE 1: note = N-terminal acetyl
XNTWKXXXXKNXX

SEQ ID NO: 539 - protein, 13 aa, synthetic construct
  SITE 13: note = C-terminal amidyl
  MOD_RES 1: note = L-penicillamine
  MOD_RES 4: note = 7-methyl-L-tryptophan
  MOD_RES 5: note = N6-acetyl-L-lysine
  MOD_RES 6: note = L-penicillamine
  MOD_RES 7: note (S)-5-(4-(2-amino-2-carboxyethyl)phenoxy)-N,N,N-trimethylpe ntan-1-aminium
  MOD_RES 8: note = 3-(2-naphthyl)-L-alanine
  MOD_RES 9: note = 1-amino-4,4-difluorocyclohexane-1-carboxylic acid
  MOD_RES 10: note = N6-acetyl-L-lysine
  MOD_RES 12: note = 3-(3-Pyridyl)-L-alanine
  MOD_RES 13: note = MeGly
  SITE 1: note = N-terminal acetyl
XNTWKXXXXKNXX

SEQ ID NO: 540 - protein, 14 aa, synthetic construct
  SITE 14: note = C-terminal amidyl
  MOD_RES 2: note = L-penicillamine
  MOD_RES 5: note (S)-3-(7-(3-acetamidophenyl)-1H-indol-3-yl)-2-aminopropanoi c acid
  MOD_RES 6: note = N6-acetyl-L-lysine
  MOD_RES 7: note = L-penicillamine
  MOD_RES 8: note (S)-5-(4-(2-amino-2-carboxyethyl)phenoxy)-N,N,N-trimethylpe ntan-1-aminium
  MOD_RES 9: note = 3-(2-naphthyl)-L-alanine
  MOD_RES 10: note = 4-aminotetrahydro-2H-pyran-4-carboxylic acid
  MOD_RES 10: note = N6-acetyl-L-lysine
  MOD_RES 13: note = (S)-2-amino-3-(5-methylpyridin-3-yl)propanoic acid
  MOD_RES 14: note = MeGly
  SITE 1: note = N-terminal acetyl
  SITE 1: note = D-Arginine
RXNTXKXXXXENXX

SEQ ID NO: 541 - protein, 14 aa, synthetic construct
  SITE 14: note = C-terminal amidyl
  SITE 1: note = D-Arginine
  MOD_RES 2: note = L-penicillamine
  MOD_RES 5: note = 7-methyl-L-tryptophan
  MOD_RES 6: note = N6-acetyl-L-lysine
  MOD_RES 7: note = L-penicillamine
  MOD_RES 8: note = 4-(2-aminoethoxy)-L-phenylalanine
  MOD_RES 9: note = 3-(2-naphthyl)-L-alanine
  MOD_RES 10: note = 4-aminotetrahydro-2H-pyran-4-carboxylic acid
  MOD_RES 11: note = N6-acetyl-L-lysine
  MOD_RES 13: note = (S)-2-amino-3-(5-methylpyridin-3-yl)propanoic acid
  MOD_RES 14: note = MeGly
  SITE 1: note = N-terminal N,N,N-trimethyl-2-(2-(3-carbonylpropoxy)ethoxy)ethan-1-amin ium
RXNTWKXXXXKNXX

SEQ ID NO: 542 - protein, 14 aa, synthetic construct
  SITE 1: note = D-Arginine
  SITE 14: note = C-terminal amidyl
  MOD_RES 2: note = L-penicillamine
  MOD_RES 5: note = 7-methyl-L-tryptophan
  MOD_RES 6: note = N6-acetyl-L-lysine
  MOD_RES 7: note = L-penicillamine
  MOD_RES 8: note (S)-5-(4-(2-amino-2-carboxyethyl)phenoxy)-N,N,N-trimethylpe ntan-1-aminium
  MOD_RES 9: note = 3-(2-naphthyl)-L-alanine
  MOD_RES 10: note = 4-aminotetrahydro-2H-pyran-4-carboxylic acid
  MOD_RES 13: note = (S)-2-amino-3-(5-methylpyridin-3-yl)propanoic acid
  MOD_RES 14: note = MeGly
  SITE 1: note = N-terminal N,N,N-trimethyl-2-(2-(3-carbonylpropoxy)ethoxy)ethan-1-amin ium
RXNTWKXXXXENXX

SEQ ID NO: 543 - protein, 14 aa, synthetic construct
  SITE 14: note = C-terminal amidyl
  SITE 1: note = D-Arginine
  MOD_RES 2: note = L-penicillamine
  MOD_RES 5: note = 7-methyl-L-tryptophan
  MOD_RES 6: note = N6-acetyl-L-lysine
  MOD_RES 7: note = L-penicillamine
  MOD_RES 8: note (S)-5-(4-(2-amino-2-carboxyethyl)phenoxy)-N,N,N-trimethylpe ntan-1-aminium
  MOD_RES 9: note = 3-(2-naphthyl)-L-alanine
  MOD_RES 10: note = 4-aminotetrahydro-2H-pyran-4-carboxylic acid
  MOD_RES 13: note = (S)-2-amino-3-(5-methylpyridin-3-yl)propanoic acid
  MOD_RES 14: note = MeGly
  SITE 1: note = N-terminal acetyl
RXNTWKXXXXENXX

SEQ ID NO: 544 - protein, 13 aa, synthetic construct
  SITE 13: note = C-terminal N,N-dimethylamidyl
  MOD_RES 1: note = L-penicillamine
  MOD_RES 4: note = 7-methyl-L-tryptophan
  MOD_RES 5: note (S)-2-(2-(3-((5-amino-5-carboxypentyl)amino)-3-oxopropoxy)e thoxy)-N,N,N-trimethylethan-1-aminium
  MOD_RES 6: note = L-penicillamine
  MOD_RES 7: note (S)-2-(2-(2-(4-(2-amino-2-carboxyethyl)phenoxy)ethoxy)ethox y)-N,N,N-trimethylethan-1-aminium
  MOD_RES 8: note = 3-(2-naphthyl)-L-alanine
  MOD_RES 9: note = 4-aminotetrahydro-2H-pyran-4-carboxylic acid
  MOD_RES 10: note = N6-acetyl-N6-methyl-L-lysine
  MOD_RES 12: note = 3-(3-Pyridyl)-L-alanine
  MOD_RES 13: note = MeGly
  SITE 1: note = N-terminal N,N,N-trimethyl-2-(2-(3-carbonylpropoxy)ethoxy)ethan-1-amin ium
  MOD_RES 2: note = N4,N4-dimethyl-L-asparagine
XNTWXXXXXXNXX

SEQ ID NO: 545 - protein, 14 aa, synthetic construct
  SITE 14: note = C-terminal N,N-dimethylamidyl
  MOD_RES 1: note 2-(2-(2-amino-2-carboxyethoxy)ethoxy)-N,N,N-trimethylethan- 1-aminium
  MOD_RES 2: note = L-penicillamine
  MOD_RES 3: note = N4,N4-dimethyl-L-asparagine
  MOD_RES 5: note = 7-methyl-L-tryptophan
  MOD_RES 6: note = N6-acetyl-N6-methyl-L-lysine
  MOD_RES 7: note = L-penicillamine
  MOD_RES 8: note (S)-4-(1-(2-(4-(2-amino-2-carboxyethyl)phenoxy)ethyl)-1H-1, 2,3-triazol-4-yl)-N,N,N-trimethylbutan-1-aminium
  MOD_RES 9: note = 3-(2-naphthyl)-L-alanine
  MOD_RES 10: note = 4-aminotetrahydro-2H-pyran-4-carboxylic acid
  MOD_RES 11: note = N6-acetyl-N6-methyl-L-lysine
  MOD_RES 13: note = 3-(3-Pyridyl)-L-alanine
  MOD_RES 14: note = MeGly
  SITE 1: note = N-terminal acetyl
XXNTWXXXXXXNXX

SEQ ID NO: 546 - protein, 13 aa, synthetic construct
  SITE 13: note = C-terminal amidyl
  MOD_RES 1: note = L-penicillamine
  MOD_RES 4: note = 7-methyl-L-tryptophan
  MOD_RES 5: note = N6-acetyl-L-lysine
  MOD_RES 6: note = L-penicillamine
  MOD_RES 7: note (S)-5-(4-(2-amino-2-carboxyethyl)phenoxy)-N,N,N-trimethylpe ntan-1-aminium
  MOD_RES 8: note = 3-(2-naphthyl)-L-alanine
  MOD_RES 9: note = 4-aminotetrahydro-2H-pyran-4-carboxylic acid
  MOD_RES 10: note = N6-(4-(4-iodophenyl)butanoyl)-D-lysine
  MOD_RES 12: note = 3-(3-Pyridyl)-L-alanine
  MOD_RES 13: note = MeGly
  SITE 1: note = N-terminal acetyl
  SITE 10: note = N6-(4-(4-iodophenyl)butanoyl)-D-lysine
XNTWKXXXXXNXX

SEQ ID NO: 547 - protein, 13 aa, synthetic construct
  SITE 13: note = C-terminal amidyl
  MOD_RES 1: note = L-penicillamine
  MOD_RES 4: note = 7-methyl-L-tryptophan
  MOD_RES 5: note = N6-acetyl-L-lysine
  MOD_RES 6: note = L-penicillamine
  MOD_RES 7: note (S)-5-(4-(2-amino-2-carboxyethyl)phenoxy)-N,N,N-trimethylpe ntan-1-aminium
  MOD_RES 8: note = 3-(2-naphthyl)-L-alanine
  MOD_RES 9: note = 4-aminotetrahydro-2H-pyran-4-carboxylic acid
  MOD_RES 10: note = N6-acetyl-L-lysine
  MOD_RES 12: note = 3-(3-Pyridyl)-L-alanine
  MOD_RES 13: note = MeGly
  SITE 1: note = N-terminal 4-(4-iodophenyl)butanoic acid
XNTWKXXXXKNXX

SEQ ID NO: 548 - protein, 14 aa, synthetic construct
  SITE 14: note = C-terminal amidyl
  SITE 1: note = D-Arginine
  MOD_RES 2: note = Abu
  MOD_RES 6: note = N6-acetyl-L-lysine
  MOD_RES 7: note = 2-methyl-cysteine
  MOD_RES 8: note = 4-(2-aminoethoxy)-L-phenylalanine
  MOD_RES 9: note = 3-(2-naphthyl)-L-alanine
  MOD_RES 10: note = 4-aminotetrahydro-2H-pyran-4-carboxylic acid
  MOD_RES 11: note = N6-acetyl-L-lysine
  MOD_RES 13: note = 3-(3-Pyridyl)-L-alanine
  MOD_RES 14: note = MeGly
  SITE 1: note = N-terminal N,N,N-trimethyl-2-(2-(3-carbonylpropoxy)ethoxy)ethan-1-amin ium
RXNTWKXXXXKNXX

SEQ ID NO: 549 - protein, 13 aa, synthetic construct
  SITE 13: note = C-terminal amidyl
  MOD_RES 1: note = L-penicillamine
  MOD_RES 4: note = 7-methyl-L-tryptophan
  MOD_RES 5: note = N6-acetyl-L-lysine
  MOD_RES 6: note = L-penicillamine
  MOD_RES 7: note (S)-4-(4-(2-amino-2-carboxyethyl)phenoxy)-N-(2-(2-methoxyet hoxy)ethyl)-N,N-dimethylbutan-1-aminium
  MOD_RES 8: note = 3-(2-naphthyl)-L-alanine
  MOD_RES 9: note = 4-aminotetrahydro-2H-pyran-4-carboxylic acid
  MOD_RES 12: note = 3-(3-Pyridyl)-L-alanine
  MOD_RES 13: note = MeGly
  SITE 1: note = N-terminal acetyl
XNTWKXXXXENXX

SEQ ID NO: 550 - protein, 13 aa, synthetic construct
  SITE 13: note = C-terminal amidyl
  MOD_RES 1: note = L-penicillamine
  MOD_RES 4: note = 7-methyl-L-tryptophan
  MOD_RES 5: note = N6-acetyl-L-lysine
  MOD_RES 6: note = L-penicillamine
  MOD_RES 7: note (S)-4-(4-(2-amino-2-carboxyethyl)phenoxy)-N,N,N-trimethylbu tan-1-aminium
  MOD_RES 8: note = 3-(2-naphthyl)-L-alanine
  MOD_RES 9: note = 4-aminotetrahydro-2H-pyran-4-carboxylic acid
  MOD_RES 12: note = 3-(3-Pyridyl)-L-alanine
  MOD_RES 13: note = MeGly
  SITE 1: note = N-terminal acetyl
XNTWKXXXXENXX

SEQ ID NO: 551 - protein, 13 aa, synthetic construct
  SITE 13: note = C-terminal amidyl
  MOD_RES 1: note = L-penicillamine
  MOD_RES 4: note = 7-methyl-L-tryptophan
  MOD_RES 5: note = N6-acetyl-L-lysine
  MOD_RES 6: note = L-penicillamine
  MOD_RES 7: note = (S)-2-amino-3-(4-(difluoromethoxy)phenyl)propanoic acid
  MOD_RES 8: note = 3-(2-naphthyl)-L-alanine
  MOD_RES 9: note = 4-aminotetrahydro-2H-pyran-4-carboxylic acid
  MOD_RES 10: note = N6-acetyl-L-lysine
  MOD_RES 12: note = 3-(3-Pyridyl)-L-alanine
  MOD_RES 13: note = MeGly
  SITE 1: note = N-terminal N,N,N-trimethyl-2-(2-(3-carbonylpropoxy)ethoxy)ethan-1-amin ium
XNTWKXXXXKNXX

SEQ ID NO: 552 - protein, 14 aa, synthetic construct
  SITE 1: note = N-terminal acetyl
  MOD_RES 1: note = O-(2-(2-guanidinoethoxy)ethyl)-L-serine
  MOD_RES 2: note = L-penicillamine
  MOD_RES 3: note = N4,N4-dimethyl-L-asparagine
  MOD_RES 5: note = 7-methyl-L-tryptophan
  MOD_RES 6: note = N6-acetyl-N6-methyl-L-lysine
  MOD_RES 7: note = L-penicillamine
  MOD_RES 8: note (S)-2-(2-(2-(4-(2-amino-2-carboxyethyl)phenoxy)ethoxy)ethox y)-N,N,N-trimethylethan-1-aminium
  MOD_RES 9: note = 3-(2-naphthyl)-L-alanine
  MOD_RES 10: note = 4-aminotetrahydro-2H-pyran-4-carboxylic acid
  MOD_RES 11: note = N6-acetyl-N6-methyl-L-lysine
  MOD_RES 13: note = 3-(3-Pyridyl)-L-alanine
  MOD_RES 14: note = MeGly
  SITE 14: note = C-terminal N,N-dimethylamidyl
XXNTWXXXXXXNXX

SEQ ID NO: 553 - protein, 14 aa, synthetic construct
  SITE 1: note = N-terminal acetyl
  MOD_RES 1: note 2-(2-(2-amino-2-carboxyethoxy)ethoxy)-N,N,N-trimethylethan- 1-aminium
  MOD_RES 2: note = L-penicillamine
  MOD_RES 5: note = 7-methyl-L-tryptophan
  MOD_RES 6: note = N6-acetyl-L-lysine
  MOD_RES 7: note = L-penicillamine
  MOD_RES 8: note = 4-(2-aminoethoxy)-L-phenylalanine
  MOD_RES 9: note = 3-(2-naphthyl)-L-alanine
  MOD_RES 10: note = 4-aminotetrahydro-2H-pyran-4-carboxylic acid
  MOD_RES 13: note = 3-(3-Pyridyl)-L-alanine
  MOD_RES 14: note = MeGly
  SITE 14: note = C-terminal amidyl
XXNTWKXXXXENXX

SEQ ID NO: 554 - protein, 14 aa, synthetic construct
  SITE 1: note = N-terminal acetyl
  MOD_RES 1: note 2-(2-(2-amino-2-carboxyethoxy)ethoxy)-N,N,N-trimethylethan- 1-aminium
  MOD_RES 2: note = L-penicillamine
  MOD_RES 5: note = 7-methyl-L-tryptophan
  MOD_RES 6: note = N6-acetyl-L-lysine
  MOD_RES 7: note = L-penicillamine
  MOD_RES 8: note = 4-(2-aminoethoxy)-L-phenylalanine
  MOD_RES 9: note = 3-(2-naphthyl)-L-alanine
  MOD_RES 10: note = 4-aminotetrahydro-2H-pyran-4-carboxylic acid
  MOD_RES 11: note = N6-acetyl-L-lysine
  MOD_RES 13: note = 3-(3-Pyridyl)-L-alanine
  MOD_RES 14: note = MeGly
  SITE 14: note = C-terminal amidyl
XXNTWKXXXXKNXX

SEQ ID NO: 555 - protein, 14 aa, synthetic construct
  SITE 1: note = N-terminal acetyl
  MOD_RES 1: note 2-(2-(2-amino-2-carboxyethoxy)ethoxy)-N,N,N-trimethylethan- 1-aminium
  MOD_RES 2: note = L-penicillamine
  MOD_RES 5: note = 7-methyl-L-tryptophan
  MOD_RES 6: note = N6-acetyl-L-lysine
  MOD_RES 7: note = L-penicillamine
  MOD_RES 8: note (S)-5-(4-(2-amino-2-carboxyethyl)phenoxy)-N,N,N-trimethylpe ntan-1-aminium
  MOD_RES 9: note = 3-(2-naphthyl)-L-alanine
  MOD_RES 10: note = 4-aminotetrahydro-2H-pyran-4-carboxylic acid
  MOD_RES 13: note = 3-(3-Pyridyl)-L-alanine
  MOD_RES 14: note = MeGly
  SITE 14: note = C-terminal amidyl
XXNTWKXXXXENXX

SEQ ID NO: 556 - protein, 14 aa, synthetic construct
  SITE 1: note = N-terminal acetyl
  MOD_RES 1: note 2-(2-(2-amino-2-carboxyethoxy)ethoxy)-N,N,N-trimethylethan- 1-aminium
  MOD_RES 2: note = L-penicillamine
  MOD_RES 5: note = 7-methyl-L-tryptophan
  MOD_RES 6: note = N6-acetyl-L-lysine
  MOD_RES 7: note = L-penicillamine
  MOD_RES 8: note (S)-5-(4-(2-amino-2-carboxyethyl)phenoxy)-N,N,N-trimethylpe ntan-1-aminium
  MOD_RES 9: note = 3-(2-naphthyl)-L-alanine
  MOD_RES 10: note = 4-aminotetrahydro-2H-pyran-4-carboxylic acid
  MOD_RES 11: note = N6-acetyl-L-lysine
  MOD_RES 13: note = 3-(3-Pyridyl)-L-alanine
  MOD_RES 14: note = MeGly
XXNTWKXXXXKNXX

SEQ ID NO: 557 - protein, 13 aa, synthetic construct
  SITE 1: note = N-terminal N,N,N-trimethyl-2-(2-(3-carbonylpropoxy)ethoxy)ethan-1-amin ium
  MOD_RES 1: note = L-penicillamine
  MOD_RES 2: note = N4,N4-dimethyl-L-asparagine
  MOD_RES 5: note = N6-acetyl-N6-methyl-L-lysine
  MOD_RES 6: note = L-penicillamine
  MOD_RES 7: note (S)-2-(2-(2-(4-(2-amino-2-carboxyethyl)phenoxy)ethoxy)ethox y)-N,N,N-trimethylethan-1-aminium
  MOD_RES 9: note = 4-aminotetrahydro-2H-pyran-4-carboxylic acid
  MOD_RES 10: note = N6-acetyl-N6-methyl-L-lysine
  MOD_RES 12: note = 3-(3-Pyridyl)-L-alanine
  MOD_RES 13: note = MeGly
  SITE 13: note = C-terminal N,N-dimethylamidyl
XNTAXXXAXXNXX

SEQ ID NO: 558 - protein, 14 aa, synthetic construct
  SITE 1: note = N-terminal acetyl
  SITE 1: note = D-Arginine
  MOD_RES 2: note = L-penicillamine
  MOD_RES 5: note = 7-methyl-L-tryptophan
  MOD_RES 6: note = N6-acetyl-L-lysine
  MOD_RES 7: note = L-penicillamine
  MOD_RES 8: note (S)-5-(4-(2-amino-2-carboxyethyl)phenoxy)-N,N,N-trimethylpe ntan-1-aminium
  MOD_RES 9: note = 3-(2-naphthyl)-L-alanine
  MOD_RES 10: note = 4-aminotetrahydro-2H-pyran-4-carboxylic acid
  MOD_RES 11: note = N6-acetyl-L-lysine
  MOD_RES 13: note = 3-(3-Pyridyl)-L-alanine
  MOD_RES 14: note = MeGly
  SITE 14: note = C-terminal amidyl
RXNTWKXXXXKNXX

SEQ ID NO: 559 - protein, 13 aa, synthetic construct
  SITE 1: note = N-terminal N,N,N-trimethyl-2-(2-(3-carbonylpropoxy)ethoxy)ethan-1-amin iumSITE203
  MOD_RES 1: note = L-penicillamine
  MOD_RES 2: note = N4,N4-dimethyl-L-asparagine
  MOD_RES 4: note = 7-methyl-L-tryptophan
  MOD_RES 5: note = N6-acetyl-N6-methyl-L-lysine
  MOD_RES 6: note = L-penicillamine
  MOD_RES 7: note (S)-5-(4-(2-amino-2-carboxyethyl)phenoxy)-N,N,N-trimethylpe ntan-1-aminium
  MOD_RES 8: note = 3-(2-naphthyl)-L-alanine
  MOD_RES 9: note = 4-aminotetrahydro-2H-pyran-4-carboxylic acid
  MOD_RES 10: note = N6-acetyl-N6-methyl-L-lysine
  MOD_RES 12: note = 3-(3-Pyridyl)-L-alanine
  MOD_RES 13: note = MeGly
  SITE 13: note = C-terminal N,N-dimethylamidyl
XNTWXXXXXXNXX

SEQ ID NO: 560 - protein, 13 aa, synthetic construct
  SITE 1: note = N-terminal N,N,N-trimethyl-2-(2-(3-carbonylpropoxy)ethoxy)ethan-1-amin ium
  MOD_RES 1: note = L-penicillamine
  MOD_RES 2: note = N4,N4-dimethyl-L-asparagine
  MOD_RES 4: note = 7-methyl-L-tryptophan
  MOD_RES 5: note = N6-acetyl-N6-methyl-L-lysine
  MOD_RES 6: note = L-penicillamine
  MOD_RES 7: note (S)-5-(4-(2-amino-2-carboxyethyl)phenoxy)-N,N,N-trimethylpe ntan-1-aminium
  MOD_RES 8: note = 3-(2-naphthyl)-L-alanine
  MOD_RES 9: note = 4-aminotetrahydro-2H-pyran-4-carboxylic acid
  MOD_RES 10: note = N6-acetyl-N6-methyl-L-lysine
  MOD_RES 11: note = N4-methyl-L-asparagine
  MOD_RES 12: note = 3-(3-Pyridyl)-L-alanine
  MOD_RES 13: note = MeGly
  SITE 13: note = C-terminal N,N-dimethylamidyl
XNTWXXXXXXNXX

SEQ ID NO: 561 - protein, 13 aa, synthetic construct
  SITE 1: note = N-terminal acetyl
  MOD_RES 1: note = L-penicillamine
  MOD_RES 4: note = 7-methyl-L-tryptophan
  MOD_RES 5: note = N6-acetyl-L-lysine
  MOD_RES 6: note = L-penicillamine
  MOD_RES 7: note = 4-(2-aminoethoxy)-L-phenylalanine(NMe3)
  MOD_RES 8: note = 3-(2-naphthyl)-L-alanine
  MOD_RES 9: note = 4-aminotetrahydro-2H-pyran-4-carboxylic acid
  MOD_RES 10: note = N6-acetyl-L-lysine
  MOD_RES 12: note = 3-(3-Pyridyl)-L-alanine
  MOD_RES 13: note = MeGly
  SITE 13: note = C-terminal amidyl
XNTWKXXXXKNXX

SEQ ID NO: 562 - protein, 13 aa, synthetic construct
  SITE 1: note = N-terminal acetyl
  MOD_RES 1: note = L-penicillamine
  MOD_RES 4: note = 7-methyl-L-tryptophan
  MOD_RES 5: note = N6-acetyl-L-lysine
  MOD_RES 6: note = L-penicillamine
  MOD_RES 7: note (S)-4-(2-(4-(2-amino-2-carboxyethyl)phenoxy)ethyl)-4-methyl morpholin-4-ium
  MOD_RES 8: note = 3-(2-naphthyl)-L-alanine
  MOD_RES 9: note = 4-aminotetrahydro-2H-pyran-4-carboxylic acid
  MOD_RES 10: note = N6-acetyl-L-lysine
  MOD_RES 12: note = 3-(3-Pyridyl)-L-alanine
  MOD_RES 13: note = MeGly
  SITE 13: note = C-terminal amidyl
XNTWKXXXXKNXX

SEQ ID NO: 563 - protein, 14 aa, synthetic construct
  SITE 1: note = N-terminal acetyl
  MOD_RES 1: note = (R)-5-amino-5-carboxy-N,N,N-trimethylpentan-1-aminium
  MOD_RES 2: note = L-penicillamine
  MOD_RES 5: note (S)-3-(7-(3-acetamidophenyl)-1H-indol-3-yl)-2-aminopropanoi c acid
  MOD_RES 6: note = N6-acetyl-L-lysine
  MOD_RES 7: note = L-penicillamine
  MOD_RES 8: note = 4-(2-aminoethoxy)-L-phenylalanine(G)
  MOD_RES 9: note = 3-(2-naphthyl)-L-alanine
  MOD_RES 10: note = 4-aminotetrahydro-2H-pyran-4-carboxylic acid
  MOD_RES 13: note = 3-(3-Pyridyl)-L-alanine
  MOD_RES 14: note = MeGly
  SITE 14: note = C-terminal amidyl
KXNTXKXXXXENXX

SEQ ID NO: 564 - protein, 13 aa, synthetic construct
  MOD_RES 1: note = L-penicillamine
  MOD_RES 2: note = N4,N4-dimethyl-L-asparagine
  MOD_RES 5: note = N6-acetyl-N6-methyl-L-lysine
  MOD_RES 6: note = L-penicillamine
  MOD_RES 7: note (S)-2-(2-(2-(4-(2-amino-2-carboxyethyl)phenoxy)ethoxy)ethox y)-N,N,N-trimethylethan-1-aminium
  MOD_RES 9: note = 4-aminotetrahydro-2H-pyran-4-carboxylic acid
  MOD_RES 10: note = N6-acetyl-N6-methyl-L-lysine
  MOD_RES 12: note = 3-(3-Pyridyl)-L-alanine
  MOD_RES 13: note = MeGly
  SITE 13: note = C-terminal N,N-dimethylamidyl
  SITE 1: note = N-terminal N,N,N-trimethyl-2-(2-(3-carbonylpropoxy)ethoxy)ethan-1-amin ium
XNTWXXXWXXNXX

SEQ ID NO: 565 - protein, 13 aa, synthetic construct
  SITE 1: note = N-terminal N,N,N-trimethyl-2-(2-(3-carbonylpropoxy)ethoxy)ethan-1-amin ium
  MOD_RES 1: note = L-penicillamine
  MOD_RES 2: note = N4,N4-dimethyl-L-asparagine
  MOD_RES 5: note = N6-acetyl-N6-methyl-L-lysine
  MOD_RES 6: note = L-penicillamine
  MOD_RES 7: note (S)-2-(2-(2-(4-(2-amino-2-carboxyethyl)phenoxy)ethoxy)ethox y)-N,N,N-trimethylethan-1-aminium
  MOD_RES 9: note = 4-aminotetrahydro-2H-pyran-4-carboxylic acid
  MOD_RES 10: note = N6-acetyl-N6-methyl-L-lysine
  MOD_RES 12: note = 3-(3-Pyridyl)-L-alanine
  MOD_RES 13: note = MeGly
  SITE 13: note = C-terminal N,N-dimethylamidyl
XNTFXXXFXXNXX

SEQ ID NO: 566 - protein, 13 aa, synthetic construct
  SITE 1: note = N-terminal N,N,N-trimethyl-2-(2-(3-carbonylpropoxy)ethoxy)ethan-1-amin ium
  MOD_RES 1: note = L-penicillamine
  MOD_RES 2: note = N4,N4-dimethyl-L-asparagine
  MOD_RES 5: note = N6-acetyl-N6-methyl-L-lysine
  MOD_RES 6: note = L-penicillamine
  MOD_RES 7: note (S)-2-(2-(2-(4-(2-amino-2-carboxyethyl)phenoxy)ethoxy)ethox y)-N,N,N-trimethylethan-1-aminium
  MOD_RES 9: note = 4-aminotetrahydro-2H-pyran-4-carboxylic acid
  MOD_RES 10: note = N6-acetyl-N6-methyl-L-lysine
  MOD_RES 12: note = 3-(3-Pyridyl)-L-alanine
  MOD_RES 13: note = MeGly
  SITE 13: note = C-terminal N,N-dimethylamidyl
XNTLXXXLXXNXX

SEQ ID NO: 567 - protein, 14 aa, synthetic construct
  SITE 1: note = N-terminal acetyl
  MOD_RES 1: note = (R)-5-amino-5-carboxy-N,N,N-trimethylpentan-1-aminium
  MOD_RES 2: note = Abu
  MOD_RES 6: note = N6-acetyl-L-lysine
  MOD_RES 7: note = 2-methyl-cysteine
  MOD_RES 8: note (S)-5-(4-(2-amino-2-carboxyethyl)phenoxy)-N,N,N-trimethylpe ntan-1-aminium
  MOD_RES 9: note = 3-(2-naphthyl)-L-alanine
  MOD_RES 10: note = 4-aminotetrahydro-2H-pyran-4-carboxylic acid
  MOD_RES 13: note = 3-(3-Pyridyl)-L-alanine
  MOD_RES 14: note = MeGly
  SITE 14: note = C-terminal amidyl
KXNTWKXXXXENXX

SEQ ID NO: 568 - protein, 14 aa, synthetic construct
  SITE 1: note = N-terminal acetyl
  SITE 1: note = D-Arginine
  MOD_RES 2: note = Abu
  MOD_RES 6: note = N6-acetyl-L-lysine
  MOD_RES 7: note = 2-methyl-cysteine
  MOD_RES 8: note (S)-5-(4-(2-amino-2-carboxyethyl)phenoxy)-N,N,N-trimethylpe ntan-1-aminium
  MOD_RES 9: note = 3-(2-naphthyl)-L-alanine
  MOD_RES 10: note = 4-aminotetrahydro-2H-pyran-4-carboxylic acid
  MOD_RES 11: note = N6-acetyl-L-lysine
  MOD_RES 13: note = 3-(3-Pyridyl)-L-alanine
  MOD_RES 14: note = MeGly
  SITE 14: note = C-terminal amidyl
RXNTWKXXXXKNXX

SEQ ID NO: 569 - protein, 14 aa, synthetic construct
  SITE 1: note = N-terminal acetyl
  MOD_RES 1: note = (R)-5-amino-5-carboxy-N,N,N-trimethylpentan-1-aminium
  MOD_RES 2: note = Abu
  MOD_RES 6: note = N6-acetyl-L-lysine
  MOD_RES 7: note = 2-methyl-cysteine
  MOD_RES 8: note = 4-(2-aminoethoxy)-L-phenylalanine
  MOD_RES 9: note = 3-(2-naphthyl)-L-alanine
  MOD_RES 10: note = 4-aminotetrahydro-2H-pyran-4-carboxylic acid
  MOD_RES 11: note = N6-acetyl-L-lysine
  MOD_RES 13: note = 3-(3-Pyridyl)-L-alanine
  MOD_RES 14: note = MeGly
  SITE 14: note = C-terminal amidyl
KXNTWKXXXXKNXX

SEQ ID NO: 570 - protein, 13 aa, synthetic construct
  SITE 1: note = N-terminal PEG side chain
  MOD_RES 1: note = (R)-6-amino-6-carboxy-N,N,N-trimethylhexan-1-aminium
  MOD_RES 2: note = L-penicillamine
  MOD_RES 3: note = N4,N4-dimethyl-L-asparagine
  MOD_RES 5: note = 7-methyl-L-tryptophan
  MOD_RES 6: note = N6-acetyl-N6-methyl-L-lysine
  MOD_RES 7: note = L-penicillamine
  MOD_RES 8: note (S)-5-(4-(2-amino-2-carboxyethyl)phenoxy)-N,N,N-trimethylpe ntan-1-aminium
  MOD_RES 9: note = 3-(2-naphthyl)-L-alanine
  MOD_RES 10: note (2S,39S)-39-amino-5,24,33-trioxo-2-pentadecanamido-9,12,15, 18,21,28,31-heptaoxa-6,25,34-triazatetracontanedioic acid
  MOD_RES 12: note = 3-(3-Pyridyl)-L-alanine
  MOD_RES 13: note = MeGly
  SITE 13: note = C-terminal N,N-dimethylamidyl
XXNTWXXXXXNXX

SEQ ID NO: 571 - protein, 13 aa, synthetic construct
  SITE 1: note = N-terminal N,N,N-trimethyl-2-(2-(3-carbonylpropoxy)ethoxy)ethan-1-amin ium
  MOD_RES 1: note = L-penicillamine
  MOD_RES 2: note = N4,N4-dimethyl-L-asparagine
  MOD_RES 4: note = 7-methyl-L-tryptophan
  MOD_RES 5: note = N6-acetyl-N6-methyl-L-lysine
  MOD_RES 6: note = L-penicillamine
  MOD_RES 7: note = 4-(2-aminoethoxy)-L-phenylalanine(cPEG3a)
  MOD_RES 8: note = 3-(2-naphthyl)-L-alanine
  MOD_RES 9: note = 4-aminotetrahydro-2H-pyran-4-carboxylic acid
  MOD_RES 10: note = N6-acetyl-N6-methyl-L-lysine
  MOD_RES 12: note = 3-(3-Pyridyl)-L-alanine
  MOD_RES 13: note = MeGly
  SITE 13: note = C-terminal N,N-dimethylamidyl
XNTWXXXXXXNXX

SEQ ID NO: 572 - protein, 14 aa, synthetic construct
  SITE 1: note = N-terminal acetyl
  MOD_RES 1: note (2S,39R)-39-amino-5,24,33-trioxo-2-tridecanamido-9,12,15,18 ,21,28,31-heptaoxa-6,25,34-triazatetracontanedioic acid
  MOD_RES 2: note = L-penicillamine
  MOD_RES 5: note = 7-methyl-L-tryptophan
  MOD_RES 6: note = N6-acetyl-L-lysine
  MOD_RES 7: note = L-penicillamine
  MOD_RES 8: note = 4-(2-aminoethoxy)-L-phenylalanine
  MOD_RES 9: note = 3-(2-naphthyl)-L-alanine
  MOD_RES 10: note = 4-aminotetrahydro-2H-pyran-4-carboxylic acid
  MOD_RES 11: note = N6-acetyl-L-lysine
  MOD_RES 13: note = 3-(3-Pyridyl)-L-alanine
  MOD_RES 14: note = MeGly
  SITE 14: note = C-terminal amidyl
XXNTWKXXXXKNXX

SEQ ID NO: 573 - protein, 13 aa, synthetic construct
  SITE 1: note = N-terminal N,N,N-trimethyl-2-(2-(3-carbonylpropoxy)ethoxy)ethan-1-amin ium
  MOD_RES 1: note = L-penicillamine
  MOD_RES 2: note = N4,N4-dimethyl-L-asparagine
  MOD_RES 4: note = 7-methyl-L-tryptophan
  MOD_RES 5: note = N6-acetyl-N6-methyl-L-lysine
  MOD_RES 6: note = L-penicillamine
  MOD_RES 7: note (S)-2-(2-(2-(4-(2-amino-2-carboxyethyl)phenoxy)ethoxy)ethox y)-N,N,N-trimethylethan-1-aminium
  MOD_RES 8: note = 3-(2-naphthyl)-L-alanine
  MOD_RES 9: note = 4-aminotetrahydro-2H-pyran-4-carboxylic acid
  MOD_RES 10: note = N6-acetyl-N6-methyl-L-lysine
  MOD_RES 13: note = MeGly
  SITE 13: note = C-terminal N,N-dimethylamidyl
XNTWXXXXXXNFX

SEQ ID NO: 574 - protein, 13 aa, synthetic construct
  SITE 1: note = N-terminal N,N,N-trimethyl-2-(2-(3-carbonylpropoxy)ethoxy)ethan-1-amin ium
  MOD_RES 1: note = L-penicillamine
  MOD_RES 2: note = N4,N4-dimethyl-L-asparagine
  MOD_RES 4: note = 7-methyl-L-tryptophan
  MOD_RES 5: note = N6-acetyl-N6-methyl-L-lysine
  MOD_RES 6: note = L-penicillamine
  MOD_RES 7: note (S)-2-(2-(2-(4-(2-amino-2-carboxyethyl)phenoxy)ethoxy)ethox y)-N,N,N-trimethylethan-1-aminium
  MOD_RES 8: note = 3-(2-naphthyl)-L-alanine
  MOD_RES 9: note = 4-aminotetrahydro-2H-pyran-4-carboxylic acid
  MOD_RES 10: note = N6-acetyl-N6-methyl-L-lysine
  MOD_RES 13: note = MeGly
  SITE 13: note = C-terminal N,N-dimethylamidyl
XNTWXXXXXXNAX

What is claimed is:

1. A cyclic peptide, or a pharmaceutically acceptable salt or solvate thereof, comprising an amino acid sequence of Formula (A):
Z³-Z⁴-Z⁵-Z⁶-Z⁷-Z⁸-Z⁹-Z¹⁰-Z¹¹-Z¹²-Z¹³-Z¹⁴-
Z¹⁵-Z¹⁶ (A),
wherein:
the amino acid residue at position Z³ is absent or the residue of r;
the amino acid residue at position Z⁴ is the residue of an amino acid that is connected to the amino acid residue at position Z⁹;
the amino acid residue at position Z⁵ is the residue of N(N(Me)2);
the amino acid residue at position Z⁶ is the residue of T;
the amino acid residue at position Z⁷ is the residue of 7MeW;
the amino acid residue at position Z⁸ is the residue of K(NMeAc);
the amino acid residue at position Z⁹ is the residue of an amino acid that is connected to the amino acid residue at position Z⁴;
the amino acid residue at position Z¹⁰ is the residue of TMAPF;
the amino acid residue at position Z¹¹ is the residue of 2Nal;
the amino acid residue at position Z¹² is absent or the residue of THP;
the amino acid residue at position Z¹³ is the residue of K(NMeAc);
the amino acid residue at position Z¹⁴ is the residue of N;
the amino acid residue at position Z¹¹ is absent or the residue of 3Pya;
the amino acid residue at position Z¹⁶ is absent or the residue of Sar;
eight or fewer of the amino acid residues at positions Z³, Z⁵, Z⁶, Z⁷, Z⁸, Z¹⁰, Z¹¹, Z¹², Z¹³, Z¹⁴, Z¹⁵ and Z¹⁶, when an amino acid residue is present at the position, are independently replaced with an amino acid residue that is different from the amino acid residue recited at said position; and
at least one of the amino acid residues at positions Z³, Z⁵, Z⁶, Z⁷, Z⁸, Z¹⁰, Z¹¹, Z¹², Z¹³, Z¹⁴, Z¹⁵ and/or Z¹⁶, when an amino acid residue is present at the position, each independently comprise(s) at least one quaternary amine.

2. A cyclic peptide, or a pharmaceutically acceptable salt or solvate thereof, comprising an amino acid sequence of Formula (B):
Z³-Z⁴-Z⁵-Z⁶-Z⁷-Z⁸-Z⁹-Z¹⁰-Z¹¹-Z¹²-Z¹³-Z¹⁴-
Z¹⁵-Z¹⁶ (B),
wherein:
the amino acid residue at position Z³ is absent or the residue of r;
the amino acid residue at position Z⁴ is the residue of an amino acid that is connected to the amino acid residue at position Z⁹;
the amino acid residue at position Z⁵ is the residue of N(N(Me)2);
the amino acid residue at position Z⁶ is the residue of T;
the amino acid residue at position Z⁷ is the residue of 7MeW;
the amino acid residue at position Z⁸ is the residue of K(NMeAc);
the amino acid residue at position Z⁹ is the residue of an amino acid that is connected to the amino acid residue at position Z⁴;
the amino acid residue at position Z⁰ is the residue of TMAPF;
the amino acid residue at position Z¹¹ is the residue of 2Nal;
the amino acid residue at position Z² is absent or the residue of THP;
the amino acid residue at position Z¹³ is the residue of K(NMeAc);
the amino acid residue at position Z⁴ is the residue of N;
the amino acid residue at position Z¹⁵ is absent or the residue of 3Pya;
the amino acid residue at position Z¹⁶ is absent or the residue of Sar;
eight or fewer of the amino acid residues at positions Z³, Z⁵, Z⁶, Z⁷, Z⁸, Z¹⁰, Z¹¹, Z¹², Z¹³, Z¹⁴, Z¹⁵ and Z¹⁶, when an amino acid residue is present at the position, are independently replaced with an amino acid residue that is different from the amino acid residue recited at said position; and
at least one of the amino acid residues at positions Z³, Z⁵, Z⁶, Z⁷, Z⁸, Z¹⁰, Z¹¹, Z¹², Z¹³, Z¹⁴, Z¹⁵ and/or Z¹⁶, when an amino acid residue is present at the position, each independently comprise(s) at least one masked amine and/or masked amide.

3. The cyclic peptide of any one of the preceding claims, wherein the amino acid residue at position Z⁴ is the residue of Abu or the residue of an amino acid comprising a sulfhydryl group, optionally wherein the amino acid comprising a sulfhydryl group is selected from the group consisting of: Pen, C or aMeC.

4. The cyclic peptide of any one of the preceding claims, wherein the amino acid residue at position Z⁹ is the residue of an amino acid comprising a sulfhydryl group, optionally wherein the amino acid comprising a sulfhydryl group is selected from the group consisting of Pen, C or aMeC.

5. The cyclic peptide of any one of the preceding claims, wherein:
(a) when the amino acid residue at position Z is the residue of an amino acid comprising a sulfhydryl group, the amino acid residue at position Z⁴ is connected to the amino acid residue at position Z⁹ by a disulfide bond formed between the amino acid comprising a sulfhydryl group at position Z⁴ and the amino acid comprising a sulfhydryl group at position Z⁹; or
(b) the amino acid residue at position Z⁴ is the residue of an amino acid comprising a sulfhydryl group, and the amino acid residue at position Z⁴ is connected to the amino acid residue at position Z⁹ by a disulfide bond formed between the amino acid comprising a sulfhydryl group at position Z⁴ and the amino acid comprising a sulfhydryl group at position Z⁹; or
(c) when the amino acid residue at position Z⁴ is the residue of Abu, the amino acid residue at position Z⁴ is connected to the amino acid residue at position Z⁹ by a thioether bond formed between the Abu at position Z⁴ and the amino acid comprising a sulfhydryl group at position Z⁹; or
(d) the amino acid residue at position Z⁴ is the residue of Abu, and the amino acid residue at position Z⁴ is connected to the amino acid residue at position Z⁹ by a thioether bond formed between the Abu at position Z⁴ and the amino acid comprising a sulfhydryl group at position Z⁹.

6. The cyclic peptide of any one of the preceding claims, wherein the cyclic peptide further comprises R^{NT}, wherein R^{NT} is bound to the N-terminal amine of the amino acid residue at position
(i) Z³ when Z³ is present, or
(ii) Z⁴ when Z³ is absent; and
R^{NT} is selected from the group consisting of: —C(O)-optionally substituted (C₁-C₂₀) alkyl and —C(O)-optionally substituted (C₁-C₄₀) heteroalkyl.

7. The cyclic peptide of any one of the preceding claims, wherein the cyclic peptide further comprises R^{CT}, wherein R^{CT} is bound to the carbonyl derived from the C-terminal carboxylic acid of the amino acid residue at position
(i) Z¹⁶ when Z¹⁶ is present,
(ii) Z¹¹ when Z¹⁶ is absent, or
(iii) Z¹⁴ when Z¹¹ and Z¹⁶ are absent; and
R^{C}r is —N(R^{y})(R^{Z}), wherein
(i) each Rⁱ and R^{Z} is independently selected from the group consisting of hydrogen, optionally substituted (C₁-C₁₅) alkyl and optionally substituted (C₁-C₃₀) heteroalkyl, or
(ii) each R^{Y} and R^{Z} come together with the N atom to which they are attached to form an optionally substituted (CH₃—C₁₄) heterocyclic ring or an optionally substituted (C₅-C₁₀) bicyclic heterocyclic ring.

8. The cyclic peptide of any one of the preceding claims, wherein four or fewer of the amino acid residues at positions Z³, Z⁵, Z⁶, Z⁷, Z⁸, Z¹⁰, Z¹¹, Z¹², Z¹³, Z¹⁴, Z¹⁵ and Z¹⁶, when an amino acid residue is present at the position, are independently replaced with an amino acid residue that is different from the amino acid residue recited at said position.

9. The cyclic peptide of any one of the preceding claims, wherein at least one of the amino acid residues at positions Z³, Z⁵, Z⁶, Z⁷, Z⁸, Z¹⁰, Z¹¹, Z¹², Z¹³, Z¹⁴, Z¹⁵ and/or Z¹⁶, when an amino acid residue is present at the position, each independently comprise(s) at least one quintenary amine.

10. The cyclic peptide of any one of the preceding claims, wherein each quintenary amine is independently selected from the group consisting of: [chemical structure]
wherein each R^{ZA} is independently selected from the group consisting of optionally substituted (C₁-C₂₀) alkyl and optionally substituted (C₁-C₂₀) heteroalkyl; [chemical structure]
wherein each R^{ZA} and R^{Z}B is independently selected from the group consisting of: optionally substituted (C₁-C₂₀) alkyl and optionally substituted (C₁-C₂₀) heteroalkyl; [chemical structure]
R wherein
(c)(i) each R^{ZA}, R^{Z}B and R^{Z}C is independently selected from the group consisting of: optionally substituted (C₁-C₂₀) alkyl and optionally substituted (C₁-C₂₀) heteroalkyl,
(c)(ii) each R^{ZA} is independently selected from the group consisting of optionally substituted (C₁-C₂₀) alkyl and optionally substituted (C₁-C₂₀) heteroalkyl, and each R^{ZB} and R^{ZC} come together with the N atom to which they are attached to form an optionally substituted (CH₃—C₁₄) heterocyclic ring, or
(c)(iii) each W^{A}, R^{ZB} and R^{ZC} come together with the N atom to which they are attached to form an optionally substituted (C₅-C₁₀) bicyclic heterocyclic ring; [chemical structure]
wherein
(d)(i) each R^{ZA} and R^{ZB} is independently selected from the group consisting of optionally substituted (C₁-C₂₀) alkyl and optionally substituted (C₁-C₂₀) heteroalkyl, and each R^{ZC} and R^{ZD} come together with the N atom to which they are attached to form an optionally substituted (CH₃—C₁₄) heterocyclyl, or
(d)(ii) each R^{ZA} and R^{ZB} come together with the N atom to which they are attached to form an optionally substituted (CH₃—C₁₄) heterocyclyl, and each R^{ZC} and R^{ZD} come together with the N atom to which they are attached to form an optionally substituted (CH₃—C₁₄) heterocyclyl, or
(d)(iii) each R^{ZA} and R^{ZB} come together with the N atom to which they are attached to form an optionally substituted (CH₃—C₁₄) heterocyclyl, and each R^{ZC} and R^{ZD} come together with the N atom to which they are attached to form an optionally substituted (CH₃—C₁₄) heterocyclic ring; [chemical structure]
wherein each R^{ZA} and R^{ZB} come together with the N atom to which they are attached to form an optionally substituted (C₅-C₁₄) heteroaromatic ring, and [chemical structure]
wherein each R^{ZA} is independently selected from the group consisting of: optionally substituted (C₁-C₂₀) alkyl and optionally substituted (C₁-C₂₀) heteroalkyl, and each R^{ZB} and R^{Z}C come together with the N atom to which they are attached to form an optionally substituted (C₅-C₁₄) heteroaryl.

11. The cyclic peptide of any one of the preceding claims, wherein at least one of the amino acid residues at positions Z³, Z⁵, Z⁶, ⁷, Z⁸, Z¹⁰, Z¹¹, Z¹², Z¹³, Z¹⁴, Z¹⁵ and/or Z¹⁶, when an amino acid residue is present at the position, each independently comprise(s) at least one masked amine and/or masked amide.

12. The cyclic peptide of any one of the preceding claims, wherein at least one of the masked amine(s) and/or masked amide(s) is independently selected from the group consisting of: [chemical structure]
wherein each R^{YA} is independently selected from the group consisting of: optionally substituted (C₁-C₁₀) alkyl and optionally substituted (C₁-C₂₀) heteroalkyl, and each R^{YB} is independently selected from the group consisting of hydrogen, optionally substituted (C₁-C₁₀) alkyl and optionally substituted (C₁-C₂₀) heteroalkyl; [chemical structure]
wherein each R^{YC} is independently selected from the group consisting of: optionally substituted (C₁-C₁₀) alkyl and optionally substituted (C₁-C₂₀) heteroalkyl, and each R^{YD} is independently selected from the group consisting of: hydrogen, optionally substituted (C₁-C₁₀) alkyl and optionally substituted (C₁-C₂₀) heteroalkyl; [chemical structure]
wherein each Rⁱ is independently selected from the group consisting of: optionally substituted (C₁-C₁₀) alkyl and optionally substituted (C₁-C₂₀) heteroalkyl, and each Rⁱ is independently selected from the group consisting of: hydrogen, optionally substituted (C₁-C₁₀) alkyl and optionally substituted (C₁-C₂₀) heteroalkyl; and [chemical structure]
wherein each R^{YG} and R^{YH} is independently selected from the group consisting of: optionally substituted (C₁-C₁₀) alkyl and optionally substituted (C₁-C₂₀) heteroalkyl.

13. The cyclic peptide of any one of the preceding claims, wherein:
(a) when the amino acid residue at position Z³ is replaced with an amino acid residue that is different from the amino acid residue recited at said position, the amino acid residue at position Z³ is replaced with an amino acid residue selected from the group consisting of APEG2ser, APEG2Ser, APEG2Ser(S*), e(c), e(C), hk(Me)₃, k(5cpa), k(cPEG3a), k(d), k(D), k(dPEG12Ac), k(dPEG6Ac), k(dPEG9Ac), k(Me)₃, K(Me)₃, k(PEG2PEG2gEC12), k(PEG2PEG2gEC14), k(PEG2PEG2PEG2PEG2gEC12), k(PEG2PEG6gEC12), SP6, APEG2Ser(RS), gPEG2Ser and k(PEG2PEG2gE(c)C12; and/or
(b) when the amino acid residue at position Z⁵ is replaced with an amino acid residue that is different from the amino acid residue recited at said position, the amino acid residue at position Z⁵ is replaced with an amino acid residue selected from the group consisting of A, APEG2Ser(S*), Dab(Me)₃, F, Gab, K(cPEG3a), K(Me)₃, K(PEG2PEG2gEC12), K(PEG2PEG2gEC14), L, N, N(N(Me)), N(NMe), Q and W; and/or
(c) when the amino acid residue at position Z⁶ is replaced with an amino acid residue that is different from the amino acid residue recited at said position, the amino acid residue at position Z⁶ is replaced with an amino acid residue selected from the group consisting of A and L; and/or
(d) when the amino acid residue at position Z⁷ is replaced with an amino acid residue that is different from the amino acid residue recited at said position, the amino acid residue at position Z⁷ is replaced with an amino acid residue selected from the group consisting of W, 7(3NAcPh)W, 7CF3W, NMe7MeW, 2Nal, A, F and L; and/or
(e) when the amino acid residue at position Z⁸ is replaced with an amino acid residue that is different from the amino acid residue recited at said position, the amino acid residue at position Z⁸ is replaced with an amino acid residue selected from the group consisting of K(NMeAC), Q, 4AmPhe, A, AIB, APEG2Ser, APEG2Ser(R*), APEG2Ser(S*), Cit, Dab(NMeAc), Dab(NMecam), Dab(NMeCam), Dab(NMeCOmPEG6), Dab(NMecPEG2a), Dab(NMecPEG3a), Dab(NMecPEG5a), Dap(NMeAc), F, K(4cpg), K(Ac), K(cPEG3a), K(Me)₃, K(NMeCOmPEG6), K(NMePEG3a), K(NmPEG6Ac), K(PEG2PEG2gEC12), K(PEG2PEG2gEC14), L, Paf(Ac), Q(N(Me)2), Q(NHtBu), W, Y and K(cPEG3aCO); and/or
(f) when the amino acid residue at position Z¹⁰ is replaced with an amino acid residue that is different from the amino acid residue recited at said position, the amino acid residue at position Z¹⁰ is replaced with an amino acid residue selected from the group consisting of:
AEF, 4DMPEF, 4DMPzEF, 4TMABYF, ACHMF, AEF((Ch)cPEG3a), AEF(Ac), AEF(AcCh), AEF(aPEG2a), AEF(BisMEP), AEF(BisMEPa), AEF(BisPEG2a)(RS), AEF(BisPEG2a)(S*),
AEF(G), AEF(Me)2, AEF(MEP), AEF(MePrpa), AEF(N(Me)2), AEF(NHCh), AEF(NHcPEG3a), AEF(NMe), AEF(NMe2mPEG3), AEF(NMe3), AEF(NMeBismPEG3), AEF(NMePEG2a), AEF(NmPEG6), AEF(NsCh), AEF(PEG2a), AEF(SPD), APEG2F, APEG3F, dFPPEG3F, Diazabiclyclooctane6F, DMMMF, DMPMF, DMTASF, F(4G), F(4N3), F(4TzLDMA4mPEG), F(4Tz1MME), F(4TzLMMol), F(4TzlMMo3), F(4TzlMMo4), F(4TzLTMA1), F(4TzlTMA2), F(4TzlTMA3), F(4TzlTMA4), F(4TzlTMA5), GPEG3F, hFTMAPF, MMoEF, MMoPF, MMPEG3F, morfTMA4F, mPEG2TMA2F, mPEG2TMA4F,
mPEG3TMA4F, MPzPEG3F, MTASF, NPyEF, NPyPEG3F, PiperazinequatF, TBAPEG3F, TMA3F, TMA4F, TMA6F, TMA8F, Tzl(Ch), TzlChmPEG, TzlChmPEG3, Y(C9OH), Y(OEOXIMECh), Y(OTzlCh), Y(OTzlChC16), Y(OTzlChC8), Y(OTzLC1aC8), Y(OTzChmPEG), Y(OTzChmPEG3), Y(OTzIPEG3a), Y(OTAPEG4a), Y(OTzITMA4), Y(OZOXIMECh), YC8CO(NHPEG3a), YC8COPip, YCF2H, ACHMF(R*, S*), ACHMF(S*, S*), AEF(cPEG3a), APF, F(4TzlAme2), F(4TzLG2), F(4TzlMMo7) and F(4TzLTMA7); and/or
(g) when the amino acid residue at position Z¹¹ is replaced with an amino acid residue that is different from the amino acid residue recited at said position, the amino acid residue at position Z¹¹ is replaced with an amino acid residue selected from the group consisting of A, F, L and W; and/or
(h) when the amino acid residue at position Z² is replaced with an amino acid residue that is different from the amino acid residue recited at said position, the amino acid residue at position Z² is replaced with an amino acid residue selected from the group consisting of: A, Achx, Achx(diF), Acpx, Aib, AIB, aMeK, aMeL, Chg, diFCpx, F, L, Pip(NMe), Pip(NMe2), W and diFAchx; and/or
(i) when the amino acid residue at position Z¹³ is replaced with an amino acid residue that is different from the amino acid residue recited at said position, the amino acid residue at position Z¹³ is replaced with an amino acid residue selected from the group consisting of:
K(NMeAC), E, A, AIB, aMeE, APEG2Ser, APEG2Ser(S*), Cit, Dab(NMeAc), Dab(NMecam), Dab(NMeCOmPEG6), Dab(NMecPEG2a), Dab(NMecPEG3a), Dap(Ac), Dap(NMeAc), E(c), E(C), F, K(5cpa), K(Ac), K(cPEG3a), K(d), K(D), K(dPEG12Ac), K(dPEG6Ac), K(dPEG9Ac), K(Me)₃, K(NMeCOmPEG6), K(NMeCOPEG4N+Me3), K(NMePEG3a), K(NmPEG6Ac), K(PEG2PEG2gEC12), K(PEG2PEG2gEC14), K(PEG2PEG2PEG2gEC12), L, Q(N(Me)2), Tetrazole, Tetrazole(NMe), W, K(DFN), K(IPB) and Nle; and/or
(j) when the amino acid residue at position Z¹⁴ is replaced with an amino acid residue that is different from the amino acid residue recited at said position, the amino acid residue at position Z¹⁴ is replaced with an amino acid residue selected from the group consisting of:
K(Ac) and N(NMe); and/or
(k) when the amino acid residue at position Z¹⁵ is replaced with an amino acid residue that is different from the amino acid residue recited at said position, the amino acid residue at position Z¹⁵ is replaced with an amino acid residue selected from the group consisting of:
3pya, 5CF33Pya, SMePyridinAla, bAla, dK, dL, F, f, H, h, k, N, NMe3Pya, NMebAla, NMeDTyr, om, Paf, s, t, THP, v, y and A; and/or
(l) when the amino acid residue at position Z¹⁶ is replaced with an amino acid residue that is different from the amino acid residue recited at said position, the amino acid residue at position Z¹⁶ is replaced with an amino acid residue selected from the group consisting of:
4diFPro, NMeDTyr, NMeK(PEG2PEG2C12), NMeK(PEG2PEG2C14), NMeK(PEG2PEG2gEC12), NMeK(PEG2PEG2gEC14), NMeK(PEG2PEG2K(PEG2PEG2gEC12)₂), NMeK(PEG2PEG2K(PEG2PEG2PEG2PEG2gEC12)₂), NMeK(PEG2PEG2PEG2gEC12), NMeK(PEG2PEG2PEG2PEG2gEC12), NMeK(PEG2PEG6gEC12), NMeK(PEG2PEG6gEC14), NMeK(SP6PEG2PEG2C12) and NMeK(SP6PEG2PEG2gEC12).

14. A compound which is selected from any one of the tables 1A, 1B, 1C, 1D, 1E and 1F or pharmaceutically acceptable salts thereof or solvates thereof.

15. A pharmaceutical composition comprising the cyclic peptide or pharmaceutically acceptable salt thereof or solvate thereof of any one of the preceding claims, and a pharmaceutically acceptable carrier, excipient, or diluent.

16. A method for treating an Inflammatory Bowel Disease (IBD), ulcerative colitis, Crohn's disease, Celiac disease (nontropical Sprue), enteropathy associated with seronegative arthropathies, microscopic colitis, collagenous colitis, eosinophilic gastroenteritis, colitis associated with radio- or chemo-therapy, colitis associated with disorders of innate immunity as in leukocyte adhesion deficiency-1, chronic granulomatous disease, glycogen storage disease type ib, Hermansky-Pudlak syndrome, Chediak-Higashi syndrome, and Wiskott-Aldrich Syndrome, pouchitis resulting after proctocolectomy and ileoanal anastomosis, gastrointestinal cancer, pancreatitis, insulin-dependent diabetes mellitus, mastitis, cholecystitis, cholangitis, pericholangitis, chronic bronchitis, chronic sinusitis, asthma, psoriasis, psoriatic arthritis, or graft versus host disease in a subject, comprising providing to the subject an effective amount of the cyclic peptide or pharmaceutically acceptable salt thereof or solvate thereof of any one of the preceding claims, or the pharmaceutical composition of any one of the preceding claims.
